United States Patent Application Publication US 2022/0211063 A1 - sequence listing, part 27

SEQ ID NO: 59 - DNA, 2041755 bp, Penicillium roqueforti
  misc_feature (6318)..(9203): n is a, c, g, or t
  misc_feature (163143)..(163247): n is a, c, g, or t
  misc_feature (224969)..(225339): n is a, c, g, or t
  misc_feature (232841)..(233737): n is a, c, g, or t
  misc_feature (335817)..(335945): n is a, c, g, or t
  misc_feature (386268)..(386437): n is a, c, g, or t
  misc_feature (488075)..(488275): n is a, c, g, or t
  misc_feature (690682)..(690848): n is a, c, g, or t
  misc_feature (738037)..(738156): n is a, c, g, or t
  misc_feature (751732)..(752194): n is a, c, g, or t
  misc_feature (756498)..(760033): n is a, c, g, or t
  misc_feature (768687)..(770184): n is a, c, g, or t
  misc_feature (808788)..(808814): n is a, c, g, or t
  misc_feature (904322)..(904556): n is a, c, g, or t
  misc_feature (906090)..(908577): n is a, c, g, or t
  misc_feature (912477)..(914540): n is a, c, g, or t
  misc_feature (922463)..(925193): n is a, c, g, or t
  misc_feature (1111741)..(1111760): n is a, c, g, or t
  misc_feature (1117938)..(1118069): n is a, c, g, or t
  misc_feature (1133059)..(1133171): n is a, c, g, or t
  misc_feature (1318212)..(1318212): n is a, c, g, or t
  misc_feature (1379550)..(1380201): n is a, c, g, or t
  misc_feature (1646998)..(1647144): n is a, c, g, or t
  misc_feature (1895302)..(1895321): n is a, c, g, or t
  misc_feature (1895864)..(1896080): n is a, c, g, or t
tatatcttttaaattaagttatataaagatctttatattaaatagttaatctatagtcttactaattaatagtaaggaatattagttcttaagatttaatatattaagtccctaataatctatatatagatataattttctatccttttttaatataaataaaataggtatatctattaagctttataataacttaatttagcctttcttaatatattctttaatataatcttaaaatactataagttttatcttaaaaagagagtaaattaatttataaggaatttatttacctacttttattttaataatataattatatttattactttctaataagttctctatttttttaaaattaaagatattagtctaatctatatattagataggtaaagctttctttataccttatattataataaagagtaggataggcttaccttttataattaaatagggatatattataagtataagggccttatagagaatctcttatataaaggctattatagttatccttttaatctttttattaaataagtaataatactatacctagtttttttagttaatattaggattaatagcttctaattaattaaatctaataattaggttatatcctattatcttaactactttataagagagtatatattaatatactatatctctactattttatagtttactatttagcttataggaattataggaatagactatagagctatctatagctataatagattttagggagcctatatctatatatagaaggtactatttaacctagttctaatttataaaggtctttttaactctactatctattagtatctatataatatatttagtaaataagctatacatataactgagctatataccctaaccaacctactggaatttaaatgtatttattttaaccataatactattaaatttattaaactaaaaagaatcatttatctagatatctattgatcttatgccctatctttctatacctactataccttagtatagcctatagatatggttttaaccccaattaagtacttctactaacctagtaattattttagaagcttcttagactaaaagaccctctatagtaggtatttactatctagattaggtctatttttacttcttcttcttatttttagtatataaattacttatttctttcttaagaagtatagtagattatatagttatttaataggcttttaaaacctagttaattactaaatttagtaagcttagagggctttttaatcttatctaaagtaatactttaatagataaagcctacttttatataaagactataaaactattaagtattaaaagttaatatcttcctattatatataaaaaaatcgatagtataaagagtttctaaagttaataaagcttaattttattagatatctaattatttagattaactttgaattattaattactaaaaaggctattaaactaagatttaataaagactttacctttaaaaataatatatagagaaaggacctaccctattatatttatatatttaatagtagttatctactattaaataatagtttttttaaataagattaaactatttactaattacttttaagtctttatattttatatacttataattataatatcttaagaattaagataagaggttagggtactatttaataaagttataaacctatttcttactaactaaaataactaggatagttttatattattaaagaagaatattagctatttcttatataaaagaatattagggggatattttatataaatctatagaaagtatctatttctaaagagattcctctttaattatagttaatttagaagaattagtatataaagttatatattattaaatactatataagtatatatagagtatagatttaggtatattaaagatatatactatcctataaatagatatagtcttttctttcttaaaagcctagatagctaataagatcctatcctcctactctattaattttataggtaattaggggtattttagtggtatagtaggcagttaaattaactaagtactaatttatagacgcgttttagttagggtatatagctcggttatatatatagcttacttaccgaatatattagtttattctttattattaattttaatactaactttataaataaaagtaagttttaacttatacttaatattattaagtcctaatactactaatactataaatattaaggtaattagttttttaattataaattccctttagtctctttatagatatttatatagtaacctagctttctatacttaaagtagttattatagaggatactattaggatttattttttatttattatatttatatttattattagatttattatcctacttatccttacctttacttttaaacctatctttatatttctttatctttaatataaataaagtataagagttaagactaatatctaggcttagatctaatttagtagtattatttttactattactaatacttttctctttctatatataaagtaatttctattagttagagatttaactttctattataaaaagatatctaatatatattttatatatttctaactctatatactattttaataacttagtataaactatattaattactttagcctaaaggtattctttctaatactattaattatataggtactttagatagtaatagatagtattaaactatattataaatatctatatagattaatattatttctattataaaatactatattctaatatattatttttatagatattttaaggattatttataagatatagatagaagtcctagaagttttattaaatagtaaattctttaaatatctttatataagactactaattatttaattatagtctttaccttatataaactaaaattatactattactaatatttattaaaatataattaaaattagttaataaaggtatagtattattaagttatatttctataaaatagtttaatatttatagattctcttaatatataaatataatatcttttaataacctatagtataatatagttatttatatttattaaaataagagactttatttactttaagatttctaattctataaagaggttttagtattccttccttatcttagtttctttaatatatttcctaagttaattaagggttaataagaaaagatttataagatattatactaatattaggtctaatagtatagtagtttcctatattaattctaaggtatctataaaaagatagtttataatagaaagaaggatttaattaattaaagcctatttattaggctataatattatagggagtccctataactatatattataagggtttaatataatataaactaatataaataaagggtagtctctattaggtaatctaagtatttaaaagctattagaactataagacccctaggtatacaatacctaagggaatactatgtataggtttatatatattcctctcttatacagacctttatctattatacctaatacttgactacctagctatttacctatttaaatactaggcatttgaccccttaagagtatattataaagtattgtgcctagttctaccatactctaataatatatgataataaagatattccttcccgagcctatataggtttatatatatttccctcttgtatagactttatctgttacagccccctcgagactggtaagaattggtcttagtatattatcaatatatcatgttccctctataaagccctttatgtattacctagttaggtcttatacctataaagtttatactagtgtgaaaatgagtgagacagaacttttgaaacttctagttaataccttatccctgctcttccatttcccttattttatataagcataaatcatggcaagtgacaaccagtggttccatagctcagttggttagagcgctgtgctaataacgcagatgtcgagggttcgaccccctctgggaccattcttttttgttttttgtttttcgataaatcttatcagaatgtgatagttatggctcatttaagccttaaacaggaacattggtttttgttatagtctagtggaaaatatgctgcacgattttccgtcaaatcctcttctatcagtatccatcaatcgtctttggactttgatcgatcttcccatcttctatcagcttcacctctcactttttcaaattcaacccaatggccaagcattacacgatagctcgaagctctctgttctgtactagacgtgcagcaatcaaaagcaagccacctagtagcaaggatacccctgaaaatattgacagggaaaggtacccgtacttctcgagcagagcaccactgatgggcacatttgccatagcgctgcagttccagtcagcatactacattatcatttcaagatatgggggtcatacgatagagctgtggcacccgacacagtcccaattgccaagccaagagtggtagaagtagcaacctgggcggcacaagcttgctggagggataaaatgccctacaaatctagtcagcattcgaagtttataccattcgaggataactcactccagacgcaaagccataggcagcggaccaaattaccagaccggccacagatgtgactttagtccagcacaatgcaacaacccctgcggatatagttgctatgatgcaacagttgaattttccgtacttgtcggcaacgatgccagggaggactcgaccgaagaatgaagccccattcacaatggaaacagtatagaatgccagagatgtcgagaatcctttctcaaccgcgtaggaagtcgtgtagaaaaacggcgagaacatgccaaagtatgtaatgaacatggcgaggcacagtagctgcagcgacggttttcgaaaaagggccatcgcttctgccttgtgactctgcggcttatccttttgctccgcggtatcttcgtcacttttctggtttgaatcacgactctccaaattgattgcaggcgtattcggagatttggcgactgcacaagagaagataaagcaaggaatcatgataaatccgacgattcgcatggtccagggaaacccaatcttgggcttattgatcagtctgtcgattgcaacgggccagataactccgccgagcgatgaacccgcaagcacaatccccatcgcggcagcacgcttcacttttatatattgtccgaccagtgcgagcatcggccatgtcaccatagccatggagacacctaacagaataccctgagcgaggaggaattgatagaactcctggcatagtgaagtcatcataattgcaaaaacacacccgaatgaaccaacatataccatgaactgttcaaaggaagtatgagttttatttctcgacgattcaggaagagtatgcttaccgttggtccaaagatatcaagcattgctcccgccacgacagatatagcaaacaaaaagaatattgacacagctccgatccatgcgatggtagatgtcgaggttgaggatagctggttttttgtgtagtactcttggaagataccgaacgagttcataaaccccacggtgcaaaaggtacaagtgaaggcgcctaatataactagccatgctcggggcctagaagaggttagtgcactggtcggctacatatcttgtagcttgaagtatatttcacttacgtgtattcagttggaggactatcctttggtgacattttggcagaaatgaaatggctctagttaaaagcaagatgactacggaataccatgacctttataagaaatctgactccttaattacatctgaaaatcactctcggagtctccgggctactgtctagatgccccggaggaagaattgacagatatggtttagcgtctcggagaatccgcggagtctccgggccaacacttcaagctgtctcctatgcgaaaaacgcgctgtttctttgctttcgctgggtcactattattaaactgttttcggggagattgaaaacatgaaacgaagacaagtttctggagtcgtcaccccaggcccgaaaagacagtctcgacaagaccccgtttcctgcgagtcctgtcgaaagaagaagctgaagtgcgacagagagcttccctgtagtagctgttcttcgcgtaaactggagtgcagctatggcagctacgcctcgggggcaacccctgtgcgacnnnnnnnnnnnnnnnnnnnnnnnnnnnnnnnnnnnnnnnnnnnnnnnnnnnnnnnnnnnnnnnnnnnnnnnnnnnnnnnnnnnnnnnnnnnnnnnnnnnnnnnnnnnnnnnnnnnnnnnnnnnnnnnnnnnnnnnnnnnnnnnnnnnnnnnnnnnnnnnnnnnnnnnnnnnnnnnnnnnnnnnnnnnnnnnnnnnnnnnnnnnnnnnnnnnnnnnnnnnnnnnnnnnnnnnnnnnnnnnnnnnnnnnnnnnnnnnnnnnnnnnnnnnnnnnnnnnnnnnnnnnnnnnnnnnnnnnnnnnnnnnnnnnnnnnnnnnnnnnnnnnnnnnnnnnnnnnnnnnnnnnnnnnnnnnnnnnnnnnnnnnnnnnnnnnnnnnnnnnnnnnnnnnnnnnnnnnnnnnnnnnnnnnnnnnnnnnnnnnnnnnnnnnnnnnnnnnnnnnnnnnnnnnnnnnnnnnnnnnnnnnnnnnnnnnnnnnnnnnnnnnnnnnnnnnnnnnnnnnnnnnnnnnnnnnnnnnnnnnnnnnnnnnnnnnnnnnnnnnnnnnnnnnnnnnnnnnnnnnnnnnnnnnnnnnnnnnnnnnnnnnnnnnnnnnnnnnnnnnnnnnnnnnnnnnnnnnnnnnnnnnnnnnnnnnnnnnnnnnnnnnnnnnnnnnnnnnnnnnnnnnnnnnnnnnnnnnnnnnnnnnnnnnnnnnnnnnnnnnnnnnnnnnnnnnnnnnnnnnnnnnnnnnnnnnnnnnnnnnnnnnnnnnnnnnnnnnnnnnnnnnnnnnnnnnnnnnnnnnnnnnnnnnnnnnnnnnnnnnnnnnnnnnnnnnnnnnnnnnnnnnnnnnnnnnnnnnnnnnnnnnnnnnnnnnnnnnnnnnnnnnnnnnnnnnnnnnnnnnnnnnnnnnnnnnnnnnnnnnnnnnnnnnnnnnnnnnnnnnnnnnnnnnnnnnnnnnnnnnnnnnnnnnnnnnnnnnnnnnnnnnnnnnnnnnnnnnnnnnnnnnnnnnnnnnnnnnnnnnnnnnnnnnnnnnnnnnnnnnnnnnnnnnnnnnnnnnnnnnnnnnnnnnnnnnnnnnnnnnnnnnnnnnnnnnnnnnnnnnnnnnnnnnnnnnnnnnnnnnnnnnnnnnnnnnnnnnnnnnnnnnnnnnnnnnnnnnnnnnnnnnnnnnnnnnnnnnnnnnnnnnnnnnnnnnnnnnnnnnnnnnnnnnnnnnnnnnnnnnnnnnnnnnnnnnnnnnnnnnnnnnnnnnnnnnnnnnnnnnnnnnnnnnnnnnnnnnnnnnnnnnnnnnnnnnnnnnnnnnnnnnnnnnnnnnnnnnnnnnnnnnnnnnnnnnnnnnnnnnnnnnnnnnnnnnnnnnnnnnnnnnnnnnnnnnnnnnnnnnnnnnnnnnnnnnnnnnnnnnnnnnnnnnnnnnnnnnnnnnnnnnnnnnnnnnnnnnnnnnnnnnnnnnnnnnnnnnnnnnnnnnnnnnnnnnnnnnnnnnnnnnnnnnnnnnnnnnnnnnnnnnnnnnnnnnnnnnnnnnnnnnnnnnnnnnnnnnnnnnnnnnnnnnnnnnnnnnnnnnnnnnnnnnnnnnnnnnnnnnnnnnnnnnnnnnnnnnnnnnnnnnnnnnnnnnnnnnnnnnnnnnnnnnnnnnnnnnnnnnnnnnnnnnnnnnnnnnnnnnnnnnnnnnnnnnnnnnnnnnnnnnnnnnnnnnnnnnnnnnnnnnnnnnnnnnnnnnnnnnnnnnnnnnnnnnnnnnnnnnnnnnnnnnnnnnnnnnnnnnnnnnnnnnnnnnnnnnnnnnnnnnnnnnnnnnnnnnnnnnnnnnnnnnnnnnnnnnnnnnnnnnnnnnnnnnnnnnnnnnnnnnnnnnnnnnnnnnnnnnnnnnnnnnnnnnnnnnnnnnnnnnnnnnnnnnnnnnnnnnnnnnnnnnnnnnnnnnnnnnnnnnnnnnnnnnnnnnnnnnnnnnnnnnnnnnnnnnnnnnnnnnnnnnnnnnnnnnnnnnnnnnnnnnnnnnnnnnnnnnnnnnnnnnnnnnnnnnnnnnnnnnnnnnnnnnnnnnnnnnnnnnnnnnnnnnnnnnnnnnnnnnnnnnnnnnnnnnnnnnnnnnnnnnnnnnnnnnnnnnnnnnnnnnnnnnnnnnnnnnnnnnnnnnnnnnnnnnnnnnnnnnnnnnnnnnnnnnnnnnnnnnnnnnnnnnnnnnnnnnnnnnnnnnnnnnnnnnnnnnnnnnnnnnnnnnnnnnnnnnnnnnnnnnnnnnnnnnnnnnnnnnnnnnnnnnnnnnnnnnnnnnnnnnnnnnnnnnnnnnnnnnnnnnnnnnnnnnnnnnnnnnnnnnnnnnnnnnnnnnnnnnnnnnnnnnnnnnnnnnnnnnnnnnnnnnnnnnnnnnnnnnnnnnnnnnnnnnnnnnnnnnnnnnnnnnnnnnnnnnnnnnnnnnnnnnnnnnnnnnnnnnnnnnnnnnnnnnnnnnnnnnnnnnnnnnnnnnnnnnnnnnnnnnnnnnnnnnnnnnnnnnnnnnnnnnnnnnnnnnnnnnnnnnnnnnnnnnnnnnnnnnnnnnnnnnnnnnnnnnnnnnnnnnnnnnnnnnnnnnnnnnnnnnnnnnnnnnnnnnnnnnnnnnnnnnnnnnnnnnnnnnnnnnnnnnnnnnnnnnnnnnnnnnnnnnnnnnnnnnnnnnnnnnnnnnnnnnnnnnnnnnnnnnnnnnnnnnnnnnnnnnnnnnnnnnnnnnnnnnnnnnnnnnnnnnnnnnnnnnnnnnnnnnnnnnnnnnnnnnnnnnnnnnnnnnnnnnnnnnnnnnnnnnnnnnnnnnnnnnnnnnnnnnnnnnnnnnnnnnnnnnnnnnnnnnnnnnnnnnnnnnnnnnnnnnnnnnnnnnnnnnnnnnnnnnnnnnnnnnnnnnnnnnnnnnnnnnnnnnnnnnnnnnnnnnnnnnnnnnnnnnnnnggttccatagctcagttggttagagcgctgtgctaataacgcagatgtcgagggttcgaccccctctgggaccattttttgctcctcttctatcagtatccgttcccgaccgcctttggactttgatcgatcttattcttcccatgttctatcagcctcatctcttactttcttaatgatgcaaagctcaaatggttaagctattgcagcttcaaaaaccatctgccttcctcttagtaatggtgcagacctctggtagatcctttgatatcgctttttgcggaggatatctattttgatctcgaagagaacgatcttccttcccggacgaatgaagaaactgaagagcagctggagcttcgaaataagattgttagatatctcaagagcaacatgtgggggaaacataatggatatatccagttcggtgataattacgagtacgatgtcttccctattgttctatactagtatctaaacgatagatcccttcgtgagagaaagaatactatccataatactattaacagtatttttccagctatttgagagacactcccctcggccgactgcctatactattgagtgacatttggagtattaccctccatctactcctgtacttatcagacgagattatttgtgtgagccgaacttgttctatggagaacgaagtgtaagtaatagacgaaccccgaaccccatcctcttcaaagtatatatattaattaaagttgtcttattgacatagctcgatggcatttattctggtgaagaccatgttgatcgttattacaaaccacaagtatagggttagcagcaagaggaagatcagtggagatatcatataagaggaagtttctagaaaatactcctcattccttcggatggaagtaggctgcaatgactgcgaagacgattaccatgacgatagaaaaaagctacctgctaaaaaaaaagccagaaaccgagaagtaactagaagagaagctctcggtaaggtatcttggttgtgtctgaaggagtaaagaatgcgactactgtgctgtgttataacctgccttataaaagagccttttaagatactccaggagatacctactaagaagatacttaccagtattctcgagaggataaaataagattttcatgagcgatatgaatccttccttgacagctataaagtgagtacattcggtagaggaaatactataagccgcccttataccaaacacaatctcaactttaacaatcttgagatccggttctgttgggatcgatgagtaagtccaatgctagtatccataagctatggcctaacatctcttagattacgggcaataggtaggtaccccgaggaagaggataacccaggagtctaccttcatatcttataaacctaacagagaaagttttggttgtatattagccaatctattaagctaatagaccggatttacaagcactgtgataaggtatactgtaggctaaatccatcactttattacagcgtgtgggattccagctcttatgcttcggacgccttaaagcttaaccaatggccgagcggatagcttttctctatgttaggtgataaattttcgttttccctattgcaaaatccttgcagctttcctggcaggtcgaagattaagttttttttttttaaccattgctttcgaagacccccaggtctttcctttagcgcgtcaggtgtgtagtatatatcctgctagtaggttagttattgccgtggaagctgtcaaaaagggtggagatgattgggtctggccttttactcatggaaagagggcatttctcagtatgaacagcctttgacgaatttcaaacacctatgctaaatccgaaaaaaaagaaaacgatgtaaatataaccccagttagttataggggaaacctatatagatgctaccccccttggtctatccttggccggatctgtctactctatagcccgatgcgacacaacccgttggtccgctagcacaatggcagtaatggatgatgtaggattctacctgaatatatagataagaacaatattccgaaagctttaagtaccttattccagggatccagggaggtatatatcagcacaaagtctaagtttgatgggggtagtccattcgcaaacggtcagaacccaaagaaccaatcagataaaagaatatgaatcctagctaatgagactactccaaacagactgtaaaatctgcagaacccgagttgatggattattttatttgagatagctgaatgttctgcatctgtacgtagatggtgcttgaggccgtagtggtgatataaatctcacccccgcacgctatctctctctagcttattgtctatttcgattcgcacaatcatgcagcactggctgaattatgtaaaagttgcctgttgtgctatgtaatcggttccatagctcagttggttagagcgctgtgctaataacgcagatgtcgagggttcgaccccctctgggaccattttttttttcggacagaaaatcgcgataatgcgaatgtattggtcgatttcttacagcagaaatatctctacatggtccgaaatgtataatctggtacggaggtccatttcaaaagttctgtctcaaccttttcttggcttttttaaataatacactagcgtgtaatggcatatagctactacagcgggacctctgatatattagaccagccaaggtacctaaatagaccgccttcctaccaaatattctgctgacgagttttgaactagtagaactggcagaattaagaggaagttttttttaggtacatttcttaagccgaatatttcggaggtcctaccatatatactataacgaggggttcgatatcaagaactagggctaaggcctaagagaaagtatgggatgaattgccttagatgtatattccggcttagattgtaatgatacccttctatattaagagttgctttagaaggtgtaaggtagttggtttgttcaactatataatgtatgttgtatttaatcaaattagaacgagataacagcaatttaaaacagccttactatattaggactaagttcatactagcgtgaaaatgaatgagacagaacttttgaaatggacctccgtacagagtacagagtagttaaccagttaacttcgttaggacacaattaataagcaaatgcacagataaaagtcacacgggcggtctgtaaaatgacctgtatagaaatagtatcgatgttggtttctgacattctgaaaattgtgttttagtgcctctgcacccacctcctcaatgatgtaaaaaatgctggctgtattctataatcggttccatagctcagttggttagagcgctgtgctaataacgcagatgtcgagggttcgaccccctctgggaccattcttttttgttttttgtttttcgataaatcttatcagaatgtgatagttatggctcatttaagccttaaacaggaacattggtttttgttatagtctagtggaaaatatgctgcacgattttccgtcaaatcctcttctatcagtatccatcaatcgtctttggactttgatcgatcttcccatcttctatcagcttcacctctcactttttcaaattcaacccaatggccaagcattacacgatagctcgaagctctctgttctgtactagacgtgcagcaatcaaaagcaagccacctagtagcaaggatacccctgaaaatattgacagggaaaggtcatgttttttttccccgatctactgcaaaatgaaccagcacgctgttgaataaacaaaattgaaaagatcaaaagctgagaaattcggttccgaatgaaagtgtaagcggcgcgtagactggtgttctgcttattcgaaaggaaacgatctcgttgagtcttgttgtggttgttgtatagacgacgaagttgatcaagatttgtaggggagcgtgtacattggaattataacggtatcgagttgtggaagaactatgacctaaacttggctggcgatattaaaagaagttgtcgtagtaaaaaccgagctgttgaatttcgaaggctggtcttgcacgaatggcctactttgctgactggctgaccggtacatttctctagatctggaagaaaacctcggaacagtttggcggggtagaagaagaaaaagaaggaggtatagcctgctagagctgctgaatcttgctatacgattattaatcgtggcgggcaagaagctctaaaagctattatattaactagctgtctcccactttgcaacttgcttcttcttcctctccccattttagttattctgaattcaatgcactcttcgtttgaaagacctggcatgtcacactttatacacctttttgttttcgtctgctttgcgttctaagatggatctatctctgtactgccaaaacaaccttctttatacataggagtcattatcaagataccaacgtggaggatagtatccaatcaaccttgaaaatacatttaaagatgaccgttacaagatatatcacaagttagaatggggtggcttttccacggtatagcttacgaaagacagagagtcagtttaccccatacctcatttctagctaatcttatactagccgaaatcaatgggtctccttgaaaatcattaccgtagattcgtcgctactagagctggaacatttggtaaatgtaatggcaaaatttcgaggggagctttcttcaaactatattgttcagctacttgatgccttcgtctacgaaggccctaatgggttataccaatgtcttatatttagcttaattggtcctatagtttatcagatcgtcgcggaacactacaataataacgaaaaactcgagctggaaactacgccctaaatttcgaagtagcttttgaaagctattaaatatattcatagtactattatgtatcatgaaggtcagggtacttcctcctctatagttattttctatagttagctccattttacttacgacttgttagatattagcgatcagaatactatattcagttatactaatttatctaaagagactaaggagcagctttcgatattcttagatccctaaaagttgagccgctaaaacggattgatagtatacctctaagcaataatttgcgggcccaaatagtcgagacagcagactagattagataggtagataaggattagaaaaacattcggatcctcgatttcggagagtttctatcaaggatataaacccctaaagctggcctagctgtgttcattaagggtaccagagacattcttaccgattactttgactattacatcgatttatggcatataggttatatagtatctcaatatatcatttatttaaagaaaatatactcacagcgatactaactatagatttattaattcttattcacaacctggtcattctggtattcccgaattagtttcggagacgacttattaattggtcaaatgattgggtttatagagaagttaccagctgaatagaagcctgagtaggaatcgattaggaagatacctaacgataataagccgaaagaaggtaattgaactgatccatatacagaagtactactaattttgctcgaagattatggaacctcgaagcttgaacagatgtttgctagtttagcacctggtctaacactcaaacctctacttcgtgtgatgcaaggattaacgcgattcttaccgtctactcgccttactgcagaagaggcacttgatttgctaggtgacgcccaagattaatagataaattaagcaaatagatcacacccctttattggaacattatttatttgacataaatgttaacgtagcagattgaagaatagagtaacacgttcataatcaacatctgacccaggggggcctgactttgggacccctctggccggcgcagcaatagcttccaagtcgacctttgtcatgccagggtgcagatggatatcatacgaaagtgtagttccatcgccagatggatgaagacgctgcatacccacgagtgtaacaatttttacttgtcgttgggaagtactagccgccaaatgaagcctgaccgtcagtatactatgcgacggaggaagatggaccgtgatattctgttgagaaacaagcgacgaaggcggtatatctagacagaagtccggttgtaacgacaaagaggcatgtgtaagaacccgaacgttacgaatcaaagccatccttgggtctggctcatagttagctggaagtcctgcaaatcccagtgggagtcaaaccttggcctgatcgcctcagaagcgaatccatgggcgatgaatcaaaatgcggcttgtagggagcacgtgctaacaacgggtcaacaaaggccgggagctgagcaacacttcgccaggcgatagaatgcctcccaagcgtaacatacctgaagcggaagatgaatgccgagtgacattcgaagaggcatcaacagatgcatttgggggattttgcgaagtgaacatcgtcagggcggttgcgttggtcatcgagctcagtaaaccttgcgtgctcatagaactgttctgttgttcctctgagccagatggtgtgtttgtagtgctcgacctagggctgtcaagttgccccccaagagaccatcctcggggagttctactacctgctaatccagctccgggaatatcctgcgtatggccttgggattcgtccttaaatgtgacatctgaagattgcccatcgtttttggatagtgtatcggagctctgcccaggcagtttcaaggttaacctctgcgccattaggggcacagcagtgcccacttttaatctgatgcgagacatctcaggggttccatctacctcacggggattcggaacaagctttttggcttcggcaacgcgtcggtggaagtgattctgggctccaatgttagcctgccgaaggggacggatggtaagagcgtcgcggtatcgtctcacctccaaaacccctgcgagaatagagatatcgctgtcgtcttcattgtattccctagcatttcgccatacatagctgacctcttcttcaaaggactgccacgtaggatatgcggtggttctggatgaattcttcctactgtctgtaccgcgaactctcttttggatgcttcgtaaggacacgggatgttgaataatctcatagtaatcccggtacagattccggtctggtttcccaatgaacgggtaagaaacctcctggccactaattcggggcatcagcttcaagtaaaggaccaaaatcagtgatacctactcagaatccttgagccgggtcaactcggacataatcttgtcctgtgcagcctgaagactgtcaccttcaaaatctccctcggattcgtcctgcgactccggggttcgatctgcttcctctggtggctctaaatccagatgcgacgacgcaagattggactcatcgggaatcatgagatcatcatcctatcacacgcaccgcaacttgaattagcgattgaaacatgtggcccgatttataggcgcaaagcaacgatatagcatagtgaatagagtcgaactgccggagttgtaatgtcgcgattgccctccactcgagtgtcaagggctaatcgatatgtattaatgtaacaaattggatacttacggaaacctttcggcgtttcgttctacgaaacttcatatttggggaagctgcggcagcccgtcgctttgaggtcatgtcttagtcctgataatgtcccgagtcgcgagtcgagtcacacattgaagatagcaatatgtgactgaagaccacaggagaagtggagatacagatttaataaataaagggtcaaaattgattgaacaaattacaagtagtgatagagtatggcaaaagggagatatttagacattcctcatcttagacgtgttgcagacgcgtctacggccccggggtcatcccgccttatgtaagactggtgggccacgagatatcatagtacagaatggtatcatacagtactgtaattaaatttgtatacaaacaactgcaaatctgatgtaccggcttttgcaacggtgtaattttggtaccagctacatacatagtgcatgtgactattttgagtatgatcatgtgaccaaaattggatcgacacctgaggcatcaatagtttctctcccccactattttcccgagtcccgcaaaaacaagtccggtgcttgttgttttgacaactcacatccactcctttctctgtcgcgtcacttttattctcacccgatcattcatcctccgtacctttgattccttaatatcagatcatcttgcacaaccttagggtccctacaagagcactgcgagcgtacgtttttagttgtcgctacatgcgataatcattcagccacattgtgagccgcatcctcaagctatttatttactggccttcttgttggaacaaatcgaattgacgttgacaatctatacagttgagagatccttatactgccatctcttctcatttcactatccaaatggacatcgacccagctaggcgcaacaagaagccccgtctcctcctggagacggagcgcgagaagcttgatgaatttgtggactctattcactactcggcaaggtgaggactctatggcaatgcggtagaccctccattgactctgtatagatacaacgacgacaaatttgaataccgccatgtgcagctcccaaagaatatgctcaaaaagatccccgcagactactttgacagttctaagggcactctgaaattgctttgggaggaggaatggcgagctctgggtattacacaagtatgttgaacataactgaaagatgtgcaggggttctaataatgtgtgcgcagagcttgggatgggagcattacgaggtgcatgaacctgaacctcatatcttattgttcaagtcggttatttgcgaactgttcccttagatgtatcactaaccgtcttgtaggcgccctcttaactaccaaccccctctgcaacaataagtttggcgttatgcttggaaatatgagcagttgagaagacatcgctttatgttcgtgcatggcaggcacatgggttcgcaatattgcctattagcgtccacaaaagcttcatatttgaagttctggaatgacaccaagttccattttctccttgcccgccatttcattgacacgctaaaccaggctatctctcagtctctctattatgtcatacgaaagaccaacatctgtcttgtcatagacacctggactgttctagcatgaccattaaatcgcgtttttggccagtcattctccctactaggctgtgatgaggctgctacggatgatgagcttctccacttcctgaacttgatgtgagaatctagagatatgatctcagtcaagttatcctagattgaagaatgctgtgggagagacatggacctcctctgcttggtatttctagtcgacgctagagggggaaaaaaacagaccgagtatttgcaaagggagcggatatacctggactacccattgatgtcgttggtcatttgttttccagctttaattgagtatttcgctaatggttagcaaatcaagtaacatcaagtaacttcttctctcatctatttccacgctgcctgccactttcgcccgttcgtcgcatgacgtctttgttgcgcatctaatttgtcacgctgaggggacatggcttattgccctagattgtgactggaataaggatcggttgcgctgatcaagtcagcacatggtatagggactatagtggctcggtactaatatagctagatacatatgtatatcgtaaatagctctttggaaacgtcatttcaacccaaggttggtcgactcctagtacattagacataggaagacacagatacagtattaataattcttatagccatccatggctgcttatgcataaatatagaagtagtcgcaaatttgtggtaattctttaagtcactatggaaaacacgtatgtacatcgtattcatacatagggcaaaatgctccacgcacatttcatgaacatcaagggagaccgatattgaggtgaaagttctgggtatataggatcaacttcccaatgcctcctgtctcctcatattcagatccttgagcgtcatttccactgttcgccatccacgcttggctggatcatactcgcctttcacctcgtatcgacaaaacccattaggacccttcaacccaactggacccgtgataaagaaggctccgcggtgagcagaccgtgatgcctgggcctcttcatggtgtaatcgtaatttgaatgcctctgatgccaagtgcaaatccgaccccgggccgaggtctggtaacggtagccgctgtaataaagatatgagtgaggatgggtggtagttagaattctcggtattaggcggcatattttctttgagtccgtcagtcaggggagtttgtagcttagattgatctttctggccaatccagttccttctctcatcggtaggcgcggcagaagaatcatccaacaaatcaacggcatctagcgacttccctgcgggtttcctgaaacgatcaagttgcctcagcaagagcaccagatatgcatctctgattgctaaagcaatatgaactggtttcatgaatgtctgtaacctgtcacctatctcggggtccatcggctttgcgacccacgatatactgtcgttcttgatctccaccctgtctgccgtcagtataagagccaagcttttagagattagcagtacataccccgagcgcacatatccaggaggggcacggtctggaaattgatggacaagccagaatcccgtgagggagagaggctcgccgagtatcggtgacatatgcctccccgcgttatctaaaacgattgtggcgagttcatctaaactcgtaagcgaatgatcttcaacgggttttgaatcgaatccttacccctaagcttctggagcttcttccgatccttagaaaatttcacaaactcttgccactctggatccgatgtagtgtatagctcgccttgctgcaaacgtgaccaggcaagcggaatgaataacgctccctcgttttcgacctctttcccggtgatttcgccgcttccaacggaggttcgacgcggagatgtcttctccgggttggccataggagatagatcagcatcttcggtatcgtcgtcaaatcgtatcagtacgaaggtgctccagaggtagaatgcggtgccgtacaggagacattttgatatgaacgacctgagagattctacgttagtctggctaaagagatcttgatttggcttgaaatgggcatcttacctaatccgaggccgcctaaacctcacatgtcgcacattttgtgggtttaagaagttggaatgagcgtgtgtaggaccgaagagagacgagcgtgcgtgaggacttcgaagcagatacctgagccggagcattgggaaaagccaatccctacaatgattctcactagagtatcatctcaatatgaaaaaataaggaatagatagaatccttgaagcctgatatgcacgaggatttgtgttgcgggtttgctaataatggcaaagggttcggcggtttggtggattatgtaacgtgcggcgttgcggcgtcagggagcctaccatagacgtacactacaatatatgtgtgtagataggtgatgatctctcagaatgaatagtattactaccagaataaactgtaagcttaaaatctatgacatggaccgtagcatatatcgataattggttgagcactcaatatacatactagaccacgtgatagcttagtgatatcttatcggatgccccaaagtcgtccgtagccaaatggtattctgtcctcgactccgtttgtatccaacaaaacgctagataccctcagaggagaatcttggtttgggaatcgccacatttgccaaaatagtcttgtcttacctccggccctcccgattctagcaatatgcgctgggtgtccgccttccttgccctggcattaacaggtgcactgcaagcaaatgcactggatgctacaatcttcacgtttcctcccaagactgcaacctcttcaactgctaatctccaacaacaaacaatatcagaaaatgaggctcagcttgtcttagagcttcgcatgaagtcctctatagcatcggtcctcggaatggtggatgcagacaccgtgaaccgcttgaatcatttcacccaggatgatctcactctctttgggggagccactggggggatttctcttgagaaaagcttctttgttctggaagggatcgaccaggaagttggtaagtggaagcggactcacacttgacttaaaaactttagctaagatactctacagccctagccatgcaaaaagcccagcccaaccatcttcatattcctcagatttcctcaccctttatcgaatttgatctcctggaatcatttatcgaaagcagcctcactgcgaaaggggaccgtgggcaaatctgtacatactacaacgatgctaacagggctgcgtcatcgacatcccaggtagcaaagtcaactttaataatcttggggttccctcgctaatctttcaattataccagactcctaaggaatgcctatccagggaccctatttttgctgatgagtctgatatgcttgtccatgacttccttacactagttgattcagtggaatcctggataagcaaggatcacagttattcagctttgaagttgtcctttaaggtatcgagtttcccctgcctaattagtgaatgatttctgattccacgtcaccaattgcagaatgcctctggtgattctcttctcagaaccaagctcctagagacattgctccttcacttagctagaataccgtcgaccagcaaccaggaaatcacgatattggttctacccgctggtgttgaatcagaaggacttaaccgccgaggcgcgaagcaatcatcggcaccagtcacccatcccttcagaaggtcggcaccgctgcagtcaaccctagcgcctgtctgtcatgcttcgaactcttcgtgtgccgaatcaaccaatgactgttccggacacggttcctgctatctgaaatacggctcgggtgttgagggaactacaggcaattgttatgcatgccaatgcagacaaagtgttgttcagaatagcgatggtaccaccaagacagttcaatggggtggatcggcttgccagaaaagagacattagctcacctttcttcctcgttgcaggcgtcagtctgcttgccatcgttctagttgggagtgcgattgggatgcttttcagtatgggctcacaggagctacccagtgtcatcagcgctggtgtaggaggccctaagtctcagatgtgagcataggggaagctgtgtaggtgttagggtgtgtttttcctcttttctttttttcttggccgagggcttcatgttctttacctcattcatccctcaacctttaagcaaaaaattttgctttactttgtttctaattgccccttccctaccctgcgtctgagggaaactttcggtcaatacagcagtacatatatgtaaggtggcacaatctatttataaggggcacgcggctatagcaaaagaatatattgtatagcatgtacaaaatagtactctctgtatgtattcgagtaatgcgcaccaagagatatatagatatgcataacccattcagcctgctaaatggactaagaatcggggggaagcagtggctgccagtagcgccgtaggacaagagggagacaagacaattcgtgaatcatcagccgcaagaataaaaggtccccatgatccagacgcgccctagtccagttgcgcaaagatcgataaattacacatatcaagtcataaacaaggaaaatataactccagcccacattccagatgtggttccggcatgaaaatgagttgcagattagtcaaatcgcgaagagttatgagaaggatagcactcaaagaccaatcatgtggtaccagcttcgacttgacgtgtgcgtctttccgaaggcagtggatccacagaagccccaactagaggtggtcttcttgaggagggaaaatggaaggaaagttggcggagtcgagtaggaatcaatcgagaccaggtggattgacccgatgaacccgaggcatggggtgggtcccaaggctgatcacgcctactctgtacatgctgttctcggtttggagatacgcttctttcctctggagatgtcgattggaatattcggctaggcaagcccatctggcctctgaatccgcttgccctgccaccattccaagcaactcgagggggtctgaggattgcatccgggtggttcgaggctgtacgacgaccctgacgatctgtgacagactgtgcttcggtctgtgcacggggtttggggacatagtaatcggccttgcatagagggcaacatgcccttctgctagtaagccaggggtcgacgcatgaagcatggaaagcatggccacaagtaagtccccggatatcatcatcgtcctcaatgatatctaggcaaatcgcacaagaatcgccagggttgggcagaagatcagcagtaacagcattaccaatgtaggcaccttcatcatgttccccaatatccgtggtcatgttttcattggtcaaggaatgctgccatttctctttctgtatacctgcaccagtggactgccggttggaaggctttgaagatactgcagggcccttctccgaagtctgcaccagagggccatcttgtacctcttgaatggggggtggtaaggtatcaacggaatccacccgtacatggcccttggtagacggtgatattgcagccgtgtgaaccccaaccgcctttgtcacgatatcactttcatcctttaggctctgtggcctgctatttggggctgtgatacctccttctgttgaaaggccctggttggcgcgagatgatctccacactttgtacttgacaagtgggaaccgcccgttgacttcatccatcgtcattagccttttttcccttcgcctgcgatgagttcgtggcatggtgaccaagtctatgggctctcctacttcttcactgcggagttgacgatttcgttggttatatcgaaagcagtatttgactccaacaatgatcctgcgatgaccgtcagatgccatccctgaaacactgggaggctggcctgttggcctgggcagggggtatatgaagcaacgtaccatagatttgtaaacacaacaccaaacccaagagcgacgaagaacaataaaggtgagcttgtagcattattcgaactcgaaccctctccgtcgctactagcagtggtggtggcagcagcactactagaggctgatgttggcgttgaagacattccaaccgaaattcgatacgaaaaggatctcactcggaacgttggcgctcggattattgttggagtctcagttgcccaaagttcgatccttcatgccttgagttgtgtgtacagggcaaccctgtatgtaagtttgggtaagactccagcagattaagtccaaggcgacgagaacgtggacgggaatgatccaggttatgtaccctatgtgatagactggatatttggagattaaacctgatggtctgtcatggatgattgaccgtaagcagagcacacagaacttcctacgaagagaaggtgaatgccgagggtcggtgtcatatcattatcaatagcaagagcagaaggaacctggaggtaaagagaaagaagaggaagaggaagcgagatagagagataaagagatagatagagagaaagtggatcagggcaggacggaggccttttgatttctgggatgcatgcggatcgagactcgacacctgaggctgtgaatcacgggactgccttactgtaaggtacatccacatttgaaggggggatgagaccagggctatttacctgccccctttctttctttttctatttgaagatgatattattacatacctggctaccttcaagggtacatataagctcgtatgcatatgtacactactctatgaatcagtatagctatatgtaatgtagtatggatacagtacaatatatatgatatactactatacacacaatgtgtaatcaattcactactagttctttagattgaattatacggtaagagtggcttacattaatgtgttggttttgtgggaaagcccaattagccgaccacttacccctcgtaaagtgaaacaagaaagatgtcctatatagacatacatatataatataatgtagttatatgctggaaatatggtcaatatcaaagtttcacacggctgctacaccgctccgtacttcccgaaacctctagttcggagatctatgaactctccccttcatcacatctgcacaccccaagtctcattatggctgaacccaatccagtggttttctttgatattgcccttggaggtaagtcaatttagttattttcatgtcggctctagtgtgcggcatcggagtacatagtctggcatggcgaactctgctaagtaatataatccatacaggcgagtctctaggtcgagtgaaaatggagttgttcgccaatgtcactccacgaactgcggagaatttccgccaattctgcaccggcgagagcaaaaaccccaagggacagcctcagggctacaagggaagcaaatttcaccgagtggtatgtgatgaagatccttggatggcgatgcggaattaatgctcattgtagatcaaagacttcatgatccagggtggagatttcatcaatggcgatgggactgggtcatgtactatctatggcacctcgaaatttgccgatgaaaatttcactctcacacatgaccgtgccgggttattaagtatggctgtaagtctgaatctcgagaccgagggggatgtttaccccgaaaggatctttttactaataccagcagaattcgggcccagacaccaatggttgccaattctttataacaaccacagccacaccattcttgaacaacaagcatgtggtcttcggccaggtgattgatgggatagatatcgttaaaatgcttgaacacacccgtaccaccaaagacaagcccaaccaagacgtgacgattgtgcaatgtggagagatgtaataataattacaatagcaaacacgtcctacaaatccatagctcctagaattgcaggaaaataatttgaatcgtgggaaatatatcaatttcatatggctttagtaaccagggctcttctgatattccatagtgggcacagacgtgatataaaaaaaagtaacttcacagaatcccgtcctcaggtctagagcttgaatttattcagataatccgcagccagtgagatagcctcctcgaccttgtcagcgttggtaccgttaccaatggaggtaggtccttttcctcctgcttttcctccaacggcgccagagacgacggccgcccagtcacttgccgaagcaccttggtcactcagtgcctgtgtccgaattagtataagaatccatatgtagtaatattctaccatttgatttcccaaatgcaagaagggtagggctgatgtgttctcttactcacctgagagatgtaacatccgtgtgaaacccggccttgttcagagtcggccgccaatagataaacactcttaccctgcatcttggacttgacatggttgagagattcactgacagccttggcattggcagaaatcggaagctggaccacaagccacgacttgtcttggttttcaggagcctcgaaataggaggtgatagcgtcgacggctttcttcgattccagtttttgttgggccttttgatcatcgagaacttgcttattgatcttggcaaaccgttcgcggaacttggccttgcggacggcggagattgcaagctggttgagatccacctgaacttgcttagcctcctgctccttttcagagcccaaaggcaatgcatccagccgatcaaggcgctgtccgaattcctcggcaactctctgcacctcatgtgcatcctctccagtgacggcaataattcggcgaattcccttggcaatgccactctcctccaggatgatcaaatccttgatatcgcctgtcttctgcacatgtgttccaccgcagaactcaatgctgacttcctgccaacggggatctttgacattctgcaggatctcctccaattccacaccgacagagacaacacgaacaggatcagggtaagtctcgccgaatacggccctgacgccagaaatttgctgggcagtggcgagcggaagttcttgggagtagacagcacagttttgtcggatataatcagtcgccttggcttcgatcttctcaagctcggcgtcagagattgcgctcttgtgggagaagtcaaacctaagcttctcggcggccaccagggaacccttttgatcaacaccatcgcctaggatttccttcagagcgaaattcagtatatgggttccggtgtggttatttcggatgggccagcgtcggagctcatcatactcgcaaatgacagaattgccgacactgaatgatccgtatttcatgaagccggtgtgtaaaacgtatccggcgtaagactgtacatcgccaacttcaagctccgcttgtccgtcgatgattattttgccggtatcattttcctgaccaccctgttcggcatagaagttcgtacggtcgagaatgacgccaagctgtgccccctcaggaacatcgtcagtgctattgtgaaaagttttcccgtggtaaatagccttaacgtgagaagtgatattaccccggccgaatttaggcgaatcatccgttttttgtacgtcgttcattttctccaggttgcctaggtcatggacatcaagcttaactgtgttatcagcagccttcttttgacccttactagcttcctttgccttcaagcgagcctcttcaaattcgacatcgtcaatgcggagaccacgttcctcggccatgattcgagttaggtcaacagggaagccaaaggtatcgtacagtctccaaacatcagcgccatggagcatatcggtgcccttggctttagcatgttgggcatattgctcaaattggcgctcacctctatccaaggtcttggcaaatgacaactcttcctcgtctaagatttcgatgacatcttgctgcttgcgcttgagttcagggaacatttcacccaactgatccacaacagtcggcactagcttagcgaagaaattcccaatatcgacctggaaatatttccgcgcataccgagctcctcggcgtaggacacggcgaatcacatagccacggccctcgttgttgggaatgactccatccgagatagcgaacatcaaagtccgcacgtggtctgcaataacacggtaggcggtgtcaattccatcggcatcgtcggcgccaaagtggccgcggtattccctggccccagtggcattctggatagcctggaatataggagtgaagacatcggtatcgtagttggaaggtttgtcctggagaattgataccagtcgctcgaagcccattccagtgtcaacatgtttgttgggaaggggtctcaaggagctattcggctcgcggttatattggatgaagacgttgttccagatttccagcacatttgggtcgtcttcgttgacgagatgagcagcgttgcgtccaccgatccgatcgtagtgcacttcactacaaggtccacatgggccctggtcacccatttcccagaagttgtctttcatgtctccaggaaggatgtgagattcaggaacgcccaccgatttccatatttctttggcttccagatccggttccaatccaccagcttcattgccctcaaaataagtaacgtagaggcgatcgggatctagcccatagacttccgtcaacagggtccacgaataagtgatagcttctttcttgaagtagtcgccaaaactccagttgccgagcatctcaaagaaggtctagagactttgtcagcacttcttctggtgaatgatagaaagcgagtttctatactgacatggtgatagctatctttgccaacatcatccagatcctgtgtcaggttagtcagtgtaccataagaccctcttaaagtttatcaaggcacacccacgttatgttttccaccggcacggagacactatccagttgtatcagcaacagtcccaagtcggatgtactggtgagtgtgaattatccaataccttttgcgagttcgttgcgcgtttcatctttccaaagtctgatgaggcgtcaacggtgcccaggaagatggacttgaactggttcattcccgcattggtgaaaagaagagtcggatctgacagaggagcgacgggggaagaagggactgtatacaagaataacttcaggtcagtccatgtcgttggcgggggtggaggggtaggcaaaaaaagaagaagaatgggctcaacgcaccgaatgtatggccattttgtttaaaataatctagaaaggtgtctcggactcgttgagcagtccattctggaccgagagaagtcatcctgtcgaatgtgggatgcttggttgacagggagtgaacaaggcaaggaaagaatgttctgggttgatttctgcgaaagagatgagtcaaagcccgttccccgttcgtcaccaccccagaaacccgcatcgagcaacgaaatgcacttgaccccagatctgtgcacttagaagttcaaacgcttttctttccttttcttcttctttaattattaaccccacacttccaaacactcgcaagagaaggagagagagatagaaagtgtggatggcgggtgaggaaaatcacgggaagaagcgcccggccgaagctgaccccgacggcgcgcaaccgttaacgaagagatttggacacctccgaataggtaggcaattgaacttgaaagagttgtggaagttgtcaagttaacatatttgtagaaaataacgtgccaatctccgctcgggccaaacccaaggggcatatccaacatatccagcctatccagcctcacattgaccaatatgaccaacataatcaacataaccaacgtaaccaagacctatcctcctcaaacgatgcaatgatcttggacgacaccaaacatacgacctacattcacaacctggatcaagaattaatggaagccgactctcctggcttggtgttttcaccattcgcagagaaagtgctctcagtccctcaatccgttctatccgactcgaagccctcggggaaagaactcgttctttatacggaaccatcttccctcacggttcccaaggaaaaggataatgttcgaaaggcaattcttgaatctcgagcgcgagctagagagaacaaggttacggaagatttatacgatgatccaatggatattgatagttaaaagtaattagggatagggaatgtataaacttgtacctttaggcatacaaatgtacgtgatctacatggtagtacatgggtgtactggactctacggagtacatatccaagtagttatcagattgcatacccgtatgtaaattaccgatcccctgtaatttaccgtaaccggactcacgtgactcaccgctcccgaaaaattttctggtttttttgtgtggctccgactaaatatgcactcggcttgataaaaaaaatttcctctctcccccaccatccctcttcccatccctccctcaaaatcacatctacaatttcataatggccgattctgaggtttacgacggtgccgtcggcatcgatcttggtacgtttttgctctactaaattcgaccgcacagctgctaattgccttttttctttttcttcaggcactacctactcttgtgttgccaactacgagggcaccaatgtcgagatcagtacgcttcccccctccaaatattcgatctttctctcgaatactgactatttgatcagttgccaacgaccagggtagctacactaccccctccttcgtctctttcaccgacaaggagcgtctgattggtgatgccgccaagaaccaggccgctatgaaccctgccaacactgttttcgatatcaagtgagttgaaaaaaaaaaacataaaaaaaacctcgcgcagcctatcaattcgcgatatgcgcattctccacaattccaaattcgttctgactctaatggaacaggcgtctgatcggtcgccgcttcgatgaccccattgtcaagaaggatgttgagtcctggcccttcaaggtcatcgaccagggtggcaaccccgttgtccaggttgagtaccttaacgagaccaagaccttctctccccaggagatctcctccatggtcctcatgaaggtatggcgaaatgtatatctcatatttgttggatttgtttgctgactatttgggccagatgaaagaggtcgctgagatcaagctcggcaagaaggttgagaaggctgtgatcaccgtgcccgcctacttcaacgacaaccagcgtcaggccaccaaggatgccggtgccatcgctggcctgaacgttctccgtatcatcaacgagcctactgctgccgctatcgcctacggtctcggcgccggcaagtctgagaaggagcgcaacgtcctcatctacgatctcggtggtggtaccttcgatgtctccctgttgaacatccagggtggtgtcttcactgttaaggctaccgctggtgacactcaccttggtggtcaggatttcgatactaacctccttgaccacttcaagaaggagttccagcgtaagactggcaaggatctctccggtgatgcacgtgctctccgtcgtcttcgcactgcttgcgagcgtgctaagcgtaccctgtccaacgctacccagaccaccgtcgagattgactctctcttcgacggtgaggacctcaactcctccatcactcgcgcccgtttcgaggacctcaacgccaaggctttctctggaaccctcgagcccgtccagcaggtccttaaggattctggcatgcctaagaacaaggttgacgagatcgtccttgttggtggctccacccgtattcctcgtatccagaagctcctgagcgacttcttcgatggcaagaagctcgagaaggtaagacaagacagcactacttgatctaacgtcaaagccagttacttatcttttttccaatagagcatcaaccccgatgaggctgttgcctacggtgctgccgttcaggccggtatcctctccggcaaggccacctcggctgagaccgctgacctgctcctccttgacgttgttcctctttcccttggtgttgccatggagggtaacattttcgcccccgttgtcaaccgtggccagactgtccccactatcaagaagcgcaccttcaccactgttgtcgataaccagagcactgtccagttccccgtctaccagggtgagcgtaccaactgtgctgacaacacctccctgggagagttcactcttgctccccttcctcccatgcgcgccggtgaggccgccctcgagtgtgtcttcgaggttgacgtcaacggtatcctgaaggtcaccgccactgagaagacctctggccgcactgccaacatcactatctccaacgctgttggcaagctttccagctccgagatcgaccagatggttgacggtatgtttctcccactaacactaatatttttgactatatgctgacttgacaatctgtagacgctgccaagttcaagaccagcgatgaggctttcaccaagcgcttcgagtctcgccagcagctcgagtcttacatctcccgtgtcgaggagattgtctctgaccccggtatgtccatgaagctcaagcgcggcaacaaggagcgcattgagtccgctctcagcgacgccatggcccagctcgaggttgaggactccacccccgaggacctcaagaagaaggagcttgctcttaagcgtctgattaccaaggccatggctacacggtaaatgcatacatgggaagacatgaacatagacttatggccaacgaatttttcctctttcccgggactctgcttctcagggaatctgcgccatgtagaccttgggcagggttggtctctgtcgcgctttgtttatgaagccgggcaacttgggcgcagttttcttttcttgaaaagtatgatttgatttgttttttgtagacgaagttcgccatctgcaatttaatgacattgtgatgatctcctctcattgtaatacttggaataccgggtagttctacatggtaatatagtgtatgatatttttggcctcgaggcggaagcgcgggggtaacgtgagagatacttctggactgcgcacctccgccctggaactttttacaacaatcgcttccaccatgcaacgcattatagcccaatcaattcgctcctcttgtcctcgtcttgtggaacaccctcaaacgactcgatctttatgtcttctaccccgagcccagcgcgccgttcctctgaaccggcgtgagtttgccaactcgcctgccttgtacaagaaaaaggacaaggccaagaaagcttccgcttccgcttccgcttctgagccagaggaaagctccagtgctccttctgaagatccctttgatctttcccaattgcacaatggcatctccacggctgttgctcggctaaaagatgatctgtccaagcttcgcgcaggagggcggttcaataccgcagtcctagagagtttgagggtccatctgagcaaagacagcaaagattcggtcaaattgggagatctggcgcaggttgtgccgaagggtggacgcatgattactcttttggcagccgaggaggatgtaagttcatgatgccttgttagggcgtgagcctgctattgctgtcccaacgagccaactctaatacatttcgagcagcacttgaaacctcttacttcagcgatcgtctcctcaaacctctccttgacccctcagcccgatcctcacaacgccctccagctcaacattcctattccgccacctacaaaagaatctcgggacaagaacgttcaagccgccaagcaagcattcgaaaaggctgccggtttagtacgtgactctagaggtgccatgcataaacgtcttcaggatatgcagaagaagaaattagctcggccagatgacgtgcgcaaagctcacgatcagatggagaagattacagaccagggtcaaaaggaggcgaaggatgcattcgaaggtgccaagaagacattggaacaggcctaagccaggaaaataatgagaatcataacatatggcatggcaatggccgattgtaaaaaagactttgtaaatctaggtacagacagaggcataattggggaagatatggggaggatatgggaagaacagaggaaaacccgatcaacgaaataaatataatacaaatcacttctagcacttagttcacatatcctcagacactcttggtcttgcggccagcagaaacaagagattcaattttggccatgaactgcgaggtcttcccggttgtctggtaggtcccgttgttccggaggttcttcaacacctctctcaatacggcatgcccatctttcccgacttcagacgtggggtagtttccctgaacgaacgtttccatgagagacttggtgctttccgcgtcgatgggactaaactcgacattccgtggctccacaaggtcacccttgcgctgtgaaattcgatcggcacgaagctgagccaatcgcttggtctcttccaaagcctccgccttctcgttctcattgttgaaaagaacgctctggcccttccacaggcgccttccaagctcatagggcgggatatagccgttggcaatgcggccgcccaggctggaaagcttttcgtagacggcagccgagcgcgagttcacgtctgtaggaattgaaggccatgtctctttcaaagtagagtagctgatctcctgaggctcataacgaataggcgttggcctggatttgatgatttgctcttgaagaatttgatcaatagccgccgcttcgctatcttcgccgtcgtcattctcaggggtttttgcgttcctgcgcggcccatttcggttacccttggcgcctttggcgaagggtttaggtttgcgattttgaggttgattgccgcctcgaatgtcgcgtgatctcgggctgcggataatcttaggttgctctccaccgctagctcgtgcggctgcaaaagatctagcgtcaatcactcgaggaggacgagtttgatactggttggtgcgagctggcgggccattgggattgcgaggccggtaggaaagcgtggccgatgaagagcggggattgggtttacggttgtctaatgggcttatgttagaattcaaattccagatggccgaaatagttgcgctactgcatttattttgcccagtgcggcttcccttggatgtacctaccggatggctgggctcgattttcggcggccactgtacgagtacaggagaactggcgagcaggtgtagaaagaccgagttttgtccgttcacagtgcagcgagatctgcctcagctgtggccgaaacatgttgtattctgaatgaactaggtcgtgtccctagaacgttttggtaaagagacgcggaaagattgaacgaataattgcagtcacgtgaggcaccgccttcctgcccgctccaagtaaacgcagccaagtcttcctttggttcattgcaatacctttcgactgtcaaaatgcttcgtcgaaagccaacggctattgctattacttctgaggacattgctgcctttgaagaagctagacttcgcaaactgtctgaagaaaacaaacacccagaacagcacgcaaaggcaacctccaatgtcaacatcgaccccagtgatgagctgaaaccacttccaggtgacaaggctaggattgtccgaacccgtgaagaaagaataggcattagtcgacgtggttgactgtctacaccacgatctcgaacccctagaccaccattgcatgttggaaggacttgttccacaccatgacatttggatatgaggtacataacccaattttgatatgcttgcatgtatttcttgccctttgaaacattgaattctcttttcgtcacatcattcaccattaacaagaaacaaatagtgcaggatctttggcgttgaggatatgacagtctcatacataacacacccaccatcttgcttgtatgaaagcgtatgacagagagtgatcgagcagtcatagagcgtggtttttttttttttgagcatcagatcacggcattcctctgatatatcaatctaaatatgccaacatatctcaccatttcccctatggttacctattggctaggacgttggtttaaccccagagaagcggaatggtacattggaatatcttgttaataaaacaacacaatgcatactactttgttcatctagatcacctccatcgggcatcttggaaaggaccaatcctttaagtgacctctctcttttggcctatttcgagatatgtttgttctgatcagaggctttagcttgaaaatagacacaaagcatcaaaaatattgacgagcgaggatgacccgagaatccatctcgtatagaacaagagtatttcaccactcctccgcccaatctgaatagtgtcttttccacgggtatcaattattttctaaatgtagtctactaaatagaccaattcatgtaagctgatgatgtatagcagggttcaggcatcaactactatcctagccggtgagatatcatgatggttggacgtgtctacctcaaacttttcctcattgagccatgcttatgtcccttggcggttgtgacgtgataaagaaaaacagagcaagatcgcacaaaaaagaaaaaaagaaaatagggatatagagtgataatagcaatggttgcctgggatacttaaacaagaacccgcaggccgtaaaatctggcgactgaattggagaaaaacaaggtcgtagatgatttgggtatatgtgcgtctcatcctctttggcgcttggacatattgtcggaggtaacatcaactgggtaattccaccggcgtttcagcccttgtggatcatacacactagcaacactttgttgccagtctcgcgctgaaaacacaacagggggtacctggaactgaggaggcgagagagactgggtagacgtgacagagggcactttgttaggtgtctcgtactggatggggtattgggagttcataacattttgtacacctggcactgaattgtttatagccattggcggggagtttgcgctgacggtagaggggttcacggagaaggccatatcccattgactagagcgaaggatcagtaagagaccaagcagaaggtgaatcatttacgtacgtgataattcgggtcggatcccagtggtcttcatcgaccgacggggcatctagaggatgagttgtttgaggctgatgggcaaccattccgagggattgtatctgagaagatgtgtcggacttcgagtcttcagcatcagtcgagatcggaggggttaccggaagcggattgtaacgcactctagattggagttgactcaagtgcggatgatagtgtgcatccataggtggactgggatggtagggttccgaaggactcccgtatgggaaactgggcttcaactcgaaaggacgatgcatgtcggcggagaaagccagcctcaatgaatcgatttgagcttgaatctcaggcatgggccaggctgtggagcacgtctctagaattctcatatgacgggtgaagaattcacgggcatctgaattgaactcagggtcgggggaggtaattgcaacctgctcgcattagaatgggtttgctatgaaaaaaagaagaaagtcccataaattgttgaatacttaccaggtgcagcatcgtacaagtcaggatacaatatatggcaaaattgatgcctctttgcatgtaaagtaggccagatagcccgaatctttgcaagatagcttcttgtagtcgacagaggctttttgccgaggagtagcatagtgacatatgagtcttccattcaccaccggccgcaaaagattgagaagcgaagagttgagggcgatgtaacataataatggcgagatggcaatgggaatgcatattgcccacaaaatgggatggaagccacggtggggagccatcggcaggataattgacctgcaggtctggaggaaggttacgaagccattctgcgaaaagcgggttgatttgtacgaatcgggcatctgcgccccagtccttttgcttcttaactttgtgatagatatctgtaatgatgcggatgtgatgtgcgttgcgaacgaaataggcgtattgtcttgagcggtcgatctcataatgatcgagacctctgatgtctagcgtcggacgcatgtccaccgtctcaggatcaacaccgtaatccgaacggcctactttgatcagaagctggttgatttaataaaggatgcgacggagtagacttaccttggggcccaccgatcatcacctcaaccaccaaaagagcctgccacactctggtgtgcaccaagcattcgattggtccgagttcacagggcttgccatcggcgtgattgctgtaatgttcatgaatgtccaaatctttcgccattgagacaatcgtcttaacagtctgccaggatcgataatagtatcctttcttcggcaaagattcccttgcttttagtagcagaattaatgcttggatagtactcagacgtggtacatccatgaagctagtctcgtgtcctatgaaacgtcagtcttttgaagatggctggacgaatatcaagtatcgactcacggttagccaaagcaagccactgagcgccttctgcaggttcatcagataaacggcccgcgcaggcaaaaagggcctcgagaaggagaggagagatagaatggcgatcatgctgccattgatagtacagatgggcacgagatacgacaggaacatagggatgtatttcatcaaagtagatcttgaaataagccataacgtcgtcttcggcaggcatgagctcaggggggattcgaatcgtcacgcccgatcccgttctgagaggtggaaattgctcttcaacgtcgtcttggacaggggcgtcgggctcaattcgatcggtgcgttgccttctaatgtatggggctatcgaaggtagagtgttagcggggaaatccgtagaacgggtaatgatgccataccaatcccactctcgtcaatcttcaactccccaagtacatcactgaggttttctgcagttgactgatcgttatcaatatacacattccgatccgatggacccatggacgaagtttgcggccccggaaacatttgagactgttggaaagtctggtgtgacattgtcatttgtggtgactgaagatcgttgtagatgttgggttgagcctgaggagggacgaattgggaatacatgctcatgtgatcatatgaggggatagtattcatggttggttgactgttgtccttgaagaccggagctgctggaaatgtatgagaaccctcggctgcggcggaggggcctccggtctctagagtcgactcgccctggccatcagggagaaagtccccatcttgcccgatggtcggagggacacagactagctttagacgagtgcatgcagaacaaggccatgtatttgtcgtagccgcatcacatttgattttccttttccggcaaccgttacaggctcgcatcactaaacgtcaggcttgtcagtatgtttttgttgacttgcgatggacacttttcctacccttcagcctcttatgtcggttatgctcatcaacgaacacatagtctacaccgatgaatggttagttgtcaatgaaatgtgtaagggatagatggtgcttgagggtcatacttttctggccttctctcggggggcccgttgggggcgcaaatgaataaccttgcatgcttgcccgtttgataacaagtgtcgggtttgtaaaatggcgtagactgtgatgatagaggcaactcaagttggtattgggactatcagggtatcaagaaaggaaaacaaaaactgtgctgggaggcctatccacaaggacctgcctcgggaaattgaaggagtgagagaaggtggaggtcgaacctcgctctgcgagatggatcgaactgcaccaagagacgataaggcaggatggtggaatctgtgggagtagtcgaggcgcaagcggattaatcggggcagacaacggctatggttgcaacaaattctagagacgttgctcaatgacagatttcaggttgtcccaatgttgcgaccaacttgctgaggcttcgcgggaaattgaccggcagcagtcgccaaagtcccgagacgtgcaagtgtcctgcgaggctgttatgggttgggagatttgcgctctcgtatatcaagcgcgtggggctagacacggaaacaagatcaggccgtctttggtctcgaatgtatgtaatgaacaaatagtcgaatgctgtcataagtaccgggcagattagcgtcggttcccacacatatgatccagatcaaataaaatcacacagaaaaacattgagagtacccccgaggcagctgcttacgattcaggtaaatagaagggtttcgggtgcatatccatcgatgtcaatgtcgcaaagtactccgcattcgaatcaacgagcctggcgcattgcatctcagtagggaagaagcggaagaagcgcagagcattaggaagagcagcaacgcaggttcacaggtggaggcatagagacattggcgaataggctgtagtagttcaagaatccccggggagaaaaaagaaaaggggaaaattcgagcttgttgtgagagagggagggagggagagagaaggtcagaagctgaggggtgggaggtaccgcgggtgccaagtgtggaagaggatccaatagcgcccgccgctgtggatttagggtggaggggcgatccggactggtgattttctatattttctgtttatgaggtagcttatggagatctagggctggatttattctggcagagacatcgaggaattattccagtggattgtcgcgtataacatactacgtacacctatataaggtagggttatatagcggttgatgaatcagggatgagggagtctccacttaggagcgatactgttaccttagtgaatcagtagtaagttttatgctagttgactactattacaataattatcattatgtacgtggttatatagagtgccgggtatacggagtacctagtacctagtacctaggtacatatgtacacctgtaacatatgtacctataactatatgtagtgattcaattagggaaaaagcaatccaagaataaacacaagtgaatctttctgaaacagccccaattattcgggaaaaagacacgttctgtgaaactcgagaatcagccaaaactgccgtgacttcggacacataatgagtttaaagccaaactcggcctgtcgatcagccgcggggattgtcaggttacatacggacggagtaactttagccctattctgagggatagagtgggattactaatgatgtattaagattactaatgatatactaatccagacaatataacggagtagttaagtagagttatcatggatattccaattaaaactctggcaaattagatatgctgctcatcaaatccctcaaaatatagaatcccttttcacagactgtccccaggtactccatactccatacgccgtacgcggagtcatccagtactcgcacgtggacaggataagctggtaaacgttatcgccgcaatttttaccctcaacacactacctctactcgaccacagaccacattacccctacccctcgttcatcatggcggaaatgcaaaattcaaaccccacgatcctcaatgccgctgatctccccacgcggttgcgacccaccaccactcgaaagtccgaatatggtggtatctttacatcggccctgcccctcgccccagtagacttcgagagtcctccgtcatcggactcggaggatgacaacctactagaggagcctattgatgaacaggaaatatatggtaagcctctctctcacatatctctcccaggaaaagaaaaagcccatatgtccgagatgattggcctagctcaagtccactaaaaccgtcagacctcatctcgtcaatctccgatccggaacaccccatctcactcggtgaattagccgtggtctctctcccagatatcatgatcaagccaaccctccctgacgtccctgattcgcctcttcaaactgtcaccgtgctgatcacgcccacaatcactcactgcagtctggcaaccgtcatcggtcttggcgtccgtgttcgtctggaacaatctctcccctccagattcaggatggatgtgcgtattaaggaaggtacacatagcaccggggacgaagttaataagcagctcgccgataaggagcgtgttgctgcggccttggagaatggtgcgttgatgggggtcattgccaaaatgatggagacctgccactgaaatttcaaataccctttgtatactataagccgggtcctcgaggtaacgagctatcactggcagatagaccaggccctcttgtgtgacgaccgcctacgatgaatgactcttccggatttttaaatgacttgcattggaatgagtattagaagtacatatgaactttgataccaccataagattgatcaaaccggatcaaaggactcctcctgtagccaaccctatttcgagtagtgaaattttttgaggtcatgagtctagcacgccactttccttcaaacccttccaaagctccggctccaaaaacttactcacagtaacatcctcggccaggcccttgcgtctccgtgttttcaagacaaagtcacgcgcagtagccatggcaggagccatctccaagggcttgagcttgatatcacggtccagtggatcaccaggaaccacactccacttatcgaagacaaggtttaccatagcctgaccttgtgtgtgaattcgaagatcggtctcaaatccaaacgagtcaatcactgggatcaaaccgcgtacggagtaaagaggagttcccgcaatgggaccatccgacaggacgtgacctcttcggcgcgacaagactgtgtacaccgaagccacggagtctgcaggtcctgtcattgtgacagagtagatcggttccatgagacgcggagatgccataaggaacgacgagtatacagcacgacgggctgtagggatgatctggcctccaccgcggtagatagcttgatcggccagggacacgtccgtgagcctaaactttgtgtttcgaatggctgaacttcaattagtctcacattcgtcatatgcgaatgagaagggggaaagaaaacttacgttcttcacaaagagggccttctcgtgtaccccagctgaagccttgggtgatagagtccctgacagtaccgagaagtttcttatccacttgagagggtaaagtgtcatcttggagtatgttgggacccatttcatccggtccaaacgcccagatgcttcgcgctgcaagcttatcccaatcgtaattttcctcaaagtatcgagcaaccttccgaatagggtccttgatactgactttaccactttcaatatcctctgcaatcccatcatccaaaggctccgcaatcatcgtgattttatttttcttattcggagtgattgagtaacacatgatggcagaggtttccaccacagtctcacagaaacgtgtaacggggtcggagaccttgatctccatctccgagtatagtttccggaggtcatggagcacacagtccatgtaaagctcgccggttcctagaaccacatgctcgccagactcctcaactttggttgagatgagggggtagctcttgttaattttccgcaatccatccaacattttgggaagttcggatggattgaccggctcaacggcgaccttgaacactgattcggtcatgtgacgaatcgggcggaagatgtacacatcctcgtcatcttcaagcttaaggggtaccagcgtcgcagtcttcacaatggagttgtcgacaccacccaaaagaacccaatttccggcggggacaccgttggtcgggatattgtaacgcgtttccgcaatccacgtgtcggagatggttgctaccaccatgtcttcttcatcttctggcgtgtagccctcgccgagtacacggacctgctgaccaggccgcgctgtgccactcataattcttccaaaagagtagaagcttgcggcatcagtactgctgaagagtttggtaacatgtattaccaacggtccgttttgatcacaagcgagcatcgaggccccaattttggtatccacgggcccagtgtagtatcgctccaggaacctttgggcaccttccaccggggaaggaacgtgttgaacaaccatgtccacgaagccagtggccggcccgaagaaattctcacagactagactgagcagctccttggcatcaatcttgagctgagatggcttcaaattgacgccgacgctagccagagtctgtttcaaatcctcgggactctcgctaagtgtgtgggagtagagtttgtagatcggctccaagacaaacttgacgaatgaccgctttgcgttctcctccactcctttgcgagtgaactttcggctctggggattgtagaagatgtcaccccaaagtcgcgcggcaaattctgtcgagtccaagctcggataactgtctgcgtacatcctggcaaatgactgcaatgtaaagcaccagttcattgagcttgatgcgaatccaacattgcccttctcggggctcagtcggagtcgctcgccttggcctggcaaaacgttctcaataatcgtattgacctcttcgatcacatgcttcaatttgaaataggcatcattgggaggaagtttgagctccagaataagtcgatccatcttgttgactaccaaggtcaaggggagaccttccaatactgcatgcttgataatttgctcagtgttcgcctggacaccctcgacaacatccacaactaataccgcaccatcagctaggcggatagaggcagccacctcatcaacaaaattcacatgcccgggggtatcaaggaggttgagcaggtgagatttgcctttggtgcttggaagaacgagactcatcggtgccgatttgattgagagaccgcgttctctctctaggaaatgaacgtctgtgtatcgcagttgttcttctctcttgcgtcctgtgcgcttgtccagccgctctgttaggtcgtgcgtctgtttgaccaacatatccatgaaagcggtctttccatgatgcaggtgaccgacgattgcaacgtttcttatctgtgatgggaaactcaagagatctgacatgaactcccgggaaaagtatacaggtgggagttcggtctctgcgatcgcaaatttcttctgctggacgggggcaatgatgggctccgacaatggctgagcatcttcctcctggaccatggtttcaacatcctcgccgtagacttgttgtgcgctggggtagtattgcttgtcttcgtgcaagatgaccgcatttgaaggaccctctagacgtgagattagtgagattgcaggctttgaagaagacatattgacataccatcaacttccatcaactgtagatcatttatctcctcttcttcttcatcgtcaaaagcctcatcgaacttaaaggcttgaggttggacatcttcatggtgctcctcgtccgattccgcatcgccgatgtagttaccaaatctaggcacaattagcaaggctccagatttagagagtcaaaagaaacatactcatcatagaggtcatccataatgaatcgtagagaacgcgagcgtgtgaggtaaaaaaaagagggacccgtagctccagacgcgtgatgccggaggatctcaactttcacctggtccgagcgtctcttcggagtactcgtgcctacaccgtacagctcctcactccccaccatataatttactcttatagatgcccctccctctttgatcttttggatctttctttacttctctaaaatcctctctacttctgtatactcttccggtcttccctacttccaccaccttttctttctccaaaatgtcttctcttcctcctgtctacattgtttctactgcccgtactcccgtgggctctttcctggggtgagcatgcttgcattcgtcttttcccccttgaagacttgatctgacatcggttactgtagctccctgtctagcttgactgctcctcagcttggtgcacatgccattaagggtagggcatataccccaagctatactatacctattttcaatgctaatagtaacttgcagccgctgttgaacgggccgagggtatcaatgcctctgacgttgaggaagtcttcttcggtaacgtcttgtctgctgggtaagttatctttgctacatcttatactgcaattgagattgacgtattccttatagtgttggacaaaatcccgccagacagtgcgccctcggtgctggccttaccgattctaccatctgcactactgtcaacaaggtctgtgcttctggcctgaaggccatcattcttggtgcccagactatcatgaccggaaacgcggatattgttgtcgctggtggtaccgagtccatgtctaacacccctcactatctgcaaacatctcgcagcggtaccaagtttggtagccaggccctagttgacggcatccagaatgatggtttgactgatgcctacggcaagcacgatctcatgggtgttgcggccgaggagtgtgccgcggagcacggcttcaaccgtactcagcaggatgactatgctatccgcagctatgagaaggcccaggctgcccagaagtccggtgcatttgacaacgagattgcccctattgagatccccggcttccgtggcaagcctggcgtgactgtttcccgggatgaggaacccaagaacgtgagttcctcttgttctctgcgttagatttattgtgacgttcattgaccgttctttgcgacttatagctcaaccctgagaagctccgcgctataaagcccgccttcattccgggaactggaaccgtgaccgcccccaactcttcgcccctgaacgatggttctgcagccgttgtcttggtttcggaggctaaggtgaaggagctgggcctcaagcctattgccaagattctaggttggggagatgctgagcaacagcccagcaagttcactactgctcctgctttggctatccccaaggctctcaagcacgccggtgtgagccaggagtccatcgatgcctttgagatcaacgaggccttcagtgttgtggctcttgccaatatgaagctccttggtctctctgaggataaggtcaacatccacggtggtgcagtcgccattggacaccctcttggtgccagtggtgcccgtattgtgtctaccttgctcggtgtcttgagcgccaaggagggcaagcttggctgcgtcggcatctgcaacggtggcggcggtgccagcgccctggttattgagtctctttaaatagtaaattctgttaaggaaaaaaacagagatgtgaaacgaccttcgatctttgcatatgagataccaatttcatttttgacggggaagatactcggtggttttctgcagacataccatacccatcctgcagcgacgaacattcgcagtatcagtaccatttcttagtatctagaatagttaatgaaatatcttgtatgtttgtgtccttccagttgttgcttcgggggttggtctgagatgaagtcagagattccagcatttcaacaccaatgtactcagtttaatattgttggtcactagactattggatggcatcaatgtgttttaataaatgatacagggtatgtctgtaaagcagtcactctgccccagtgagaatattaacttcattagcctgattttgtgtacatctccgctaaatttaggacagccatgctgcctcaaacccgaaaaagacaagagaacattaagaaaaatcgtttttgggagagaaatatgaaagagtgatatcggggatgctgtaagacatatgcctctgtagactgcatttatatcggtggatataccagccctgagtgttgcagtgcgttgtcccgctcgagtcatcaagtcggcatgtagataatgcaagtgttccatgtgtttcatgagaatccccagaattaatatatatcagtatataattcctcaagtgaacatagtactattaatttggtatacatttagaaaaagtatcgcatgcgtcgttaatctatcagacattataattgagaaaccccacaaaacaagaactcatgctttcaagcaaaggctccgacgaatgccatgaggagagcaccgcaggcaacagaaacacatgcctcaacgcgtcgtctgcccttgagggtctcataactcgactcactcaagaagtcctcggcgaggagttccaccaggcccgcgaagagcaaaagaccgctgctaatggcattggtgatgccaaccattagcaaacctgttgcgctgccaggatcgtagaggttgtgtagaaccaaaccgatagcctggccaagaggagttgtcgttccgtatgctagtgacataagccatggtttcattgaattcggcgcgaacagatccggtatgagcgacgcaatccgagatcctagggcaaacccttcaaaggtctgatgaaaactgattgcaattaacagaacgacaaaggaggtgccagtcgcaacactgagcgccatgccgatgaagatgctgtgaaacaaaatgccagcttccaagaggaggcactgtagaagctgacgttgcggattctggattggcacatctgtgtcggtctgctgacagtggctttcgcttacacgggatcgatgccggtggacaggctgtgactgcgcagaatgagcttgtccactgataagtccgtcgtcatccatgtagtcatccagtccatcaaggtcatcttcatcgtcctctttatccggtgatgagtccgccaggtgaaggcggtccgattcatgggacgagcttgaagctctcgtcgtccgcaacttggagttgtgtcccatgctatctagattgagattatctgaaacctgccgggcctctaggcccgagtaatcaatatctgcgttccccccgtcacgtattgagccacgcctaacctcgccaatgagattatcatattcgcttccatgcacgtgcttggcgcctttcattgcaaagaacatttccacgataacaacggcaaagaccgatatcattgcaacaaaacctggcatagcacgatatgtttgactccaaaatcgagggagacatggatcggtcagagagacaaatgctgtggggagcagatgtacgaatgccgtcgcaatcaacacacccgttccaaaatgtctcgatatgaagaggaaccgacggggaatcggaagacgagggaaacggcgcgccagaaccggaaaggagcaagctattgtaatcccagtattagcaatggccagtcagagagccgagagaagccagtgcataccgaatgtactcagccctaggatgaggaacagtgccataacatgcaacggggtgttatatttcccccgctgtttagatccgcatgccggtgtgtcctctgaagctccacctcgccgaagaagttctgctcgcaagagagcatcggggatttctgagattgcggagagggcacgcttcaagtctactcggaacatagttagaaactgtccacgatcaatttgcaaagacagctaacctgagggtagatccttcgcagtctgccagtcttgggcattctgcattttgttatagtctcgaatttgttgagctgtaaccacatccccagttggagaggggaattgttcgtaggccgggtaactgtccaagagatataggtatagtgacgcaattgggttaagataaagatgagactacacgagatggtcgatcaggaagacaacaaaaccagcagagatattattttaaaacaaaaaggccagacggtggtttttcagacgcgatccagtgagtcttgaactccggggctgcccctttcgcttagtcatacatactacgcacgtgggcaagacgagtcctgtgatttattgcagtgaagttgccgagaagtgatctgattagataaaataacatcttaggcggctccatgtcctctatctgctaccttagtccatcccttggtacctttgggtcgtgaggaagaggcatcttggccttgagtcctagaacgtgtttttgaagttctctctgtttccaccgatccgaattgagagcccatggccttggggctttgcggaacagatggctgaggggaatccatgaccgcatcgtcccattctttttcttctagcaattcccattccgcactggccatttcccctagaagattggacttcaatttatctacgatcctggttggggttgggagtttccatattcgcatgaattcaactccttctgatgctcccaggaaagaatgtgccgtgccatgagaatagtgacccaacatgggaaaggaagttgtccgctgaatcgtggttctgggagagtcttttgcagatttcatttgtgtctgtgtgtctcggccggcaaatactcgcatcagagttgaagggtgggctggcggagctaccagcagttgccacaagctctttccgatgtcgcaaacttcctcccaggagtccgatgagaggtttatcccttgagttcgacataaccatgcaacattccatgccaagagggtggctccttcaagaaagaaggcgtatgttgcgggatcttccttcgctaaccggggcagaggcttatcgatgaagagaggccgcgggcgtgatgtgtgggtgcgcgggtccaccgtcctcgatgcagccgggctcgacgaagattggtaatcagctccatcgtgaccgttgcgcgagcgatatgatgccgagggggtgtagatcgtaggtacaggatagtttttgtgaggcagtgtaatttcggcgggaagtctcaaggaaagatagtgtgagacaatgatcagaagatgagcgatgttagaaaaagacgtggatatctgttcctgtggaatacctgtactcgctctgttagtacgccacgagatgaataactgcttgaaagcgacctcgggactatggaaacttgccattcatatctctcaagtcaacgatcaaaccacatccaagcacataggtctcccgaccttggcccttcttcgtcgccttccgcaggccatagagattggcgacttctcgacaaagataaatacgtgactccgccgtcttgctatggagggaatgccaaacgtgctccacccgtttgctggtattttgaacgcccgccaaaattccagtctcccgctcttctagttgaaagttggcagattcagcatccgaccgtctgcgtgctagggcttctttttgcttggcaatctcggcttttttggcttcgacctctaatttcaaagcctcaagctgatgcgaaaccaattgtctctttgccaaagacactgcatgtctagtgcttatcatttggaggacccagcggggagagcaagctttgtccgtatcgagcaggtcttgtccgtgcggggaaggctcatcccacgagctaccgcaggtaacagcggtctcgatctgctttccaaggacttctttctctagaagaacttgagtgctgtcgattcgtagttgatatagctgattgcgggcacatgtcggacagtggaaagaaaggcgagattgaggggcacgcgagcatatggaacagctcatcgtagacaatttgattttattttcagctgttctttgaaggcgtaaggggcatttccatgttgcgttccaggataattatgggtgctacttgagtcgccgccgagaaccatatagaggagtgagaaggggtcgtcaaagagataataatcccacatgactcaaataatacgttgatatagaggatatgaccggcctcaagacatcacctttagccaatcttttagaggaaggaagtgaagaaaagacgggatgatgttcacatgcacctgtcgtcacctgacgctccgttatcgcaatcttatctctcattttggataagggcatctggaacattcacgaatcgaaacaaaagtgacttctaaatctactgaaacaatcatcggtcttggtatggcttgattttgacacctcatcatatcgagtcagcaaatccagtatgcaggcaacaccaaacaggaccagcaaaattcctcgacgggggacaatgtcaccccgtgtcagccaaggaagcaaaagccctacgggcagtgggagcccccaagagaacggaagccctcaattaccggtcgaagatctagcatctacatctatccatgatgaagccccatttgcttctaggttgacacaagggctggaggactgcaattgggaacaactccaggggaaatatgccgatgcaatggacgaacacggccgagtagaagagaacattcgtgttgaaacagccaagcttcttgaagtaagtctcaaagcatgttctacttgcaattttgtatctgagcaatcggtaggctttcatggcatggtctcaaactactgtttcgcaagatgagaacagggctttgaaaaggttcgatcaatccagctttggtttaagatatcgattaattctctacaggttcaaaacccaaatgcagcacgttcaaaattccgaagtcaatgtggaaaacaaaaagaagcattgtaagtatcttgtcctcgtgacttgaaaacaagatctgtttgctgatctgtctaaagatgaggaagtagtaaaggctttccaaaatgcacttgccttgctaaacgatcaaatgaagatttgagcaaatgattgacacgatatttatgattatgagtttatgttaccccatcccttctcatctgaaaatcgatcttcaagacagaaattgcaccagtatgcaagaagctatccagtgtgtctcacctacgatggcctaaaaagaaaaagatcaaatcattgaaaaatgaatgtactacaaaaagagacagttgatattatgggagtcatccaaatgggactgctaggaatatcaccaatcattattgcaggcgaaagagttacaggttggtagtctgggagaatacgaggctctggactctagtcactatcattttaaggcctcggtgattattcccgggggcggtcactccgggtagctctccctgtgatatcttgccagctggcgttgaagcgtctgccggtgttggccaataaaccttcctcctcagcttcctctgcatcgtcgtcgagttgcgcttcatccaactgaggtgaacggagaagggaagtaacaaagacaattagatataagcctgtgatgttggtgttagataaacgcgaacatggaactctggtaggaatgcaacaagacaagattgagacttaccgaggaagaagaactgagcccaaaagaacaccactccaaagaatgggtagttcagcgtgacccggttcaagaaggtgctcacgacacttggtgtgcagacttgctgcgcagcaggattcttcgccaactctgagcatggcttgataagttctttggtgtttgaacaatctggcattccaatgaaagctcccggagcgcgatcgcagaatgtctgtggcccaaatgtcgcatactggggcgcgactatcattgaaatcgaataattcagcgctaaaatgatcagcatcaacatggcggtggccaaaagtagagcctggggagatgtgtggccgtttctgatttggaaaatcctgacccataggaagcggattccgaccacggcgattccaaccacagaactgcagaaaaatagcaatacaagtgcagtaaatatggcatagtcaatgggaaagaacctggcagatttaacaagtgcccagttgacgggattaaagatgttgacatgtgcgaggatgtatccacaacgatgcttgcaaatcgaattctttgctttgtcaattgcggtcaagagcatggatacccacgttaagaaagcaatgaatagcagcaagacgccccccaggagcttgaagggacggaatactgctccaagtttgtaccatgcccttatcaaccagctgcggcctccgccttgggattcttcggctaggcgttggcgccgaatcagggtcctttcttcccgcactagtgtatcaagttctcgacgatctttggaggacagaaggtcgggatctccggcacatcgtccctcaagctgccgttgccgctcctggtttacgtcaagttgttgtgtggtgctcgctcgcagggtagcactagagattgatggtgcagtcttgatcaaactgattggcagaagggccagtcccacggatgtgtataagacataaagacagagcccaattgtcatcaacagaccgagagcaaaagtgagagcgcgctccccatcttttcagagttatgtcagcttcacatttgtgttacacgacagaatactcgaatactcacgattttcagtcagtaagcgcctgaagtaatccaggtccatatcattctttcctcgtgacactgggacgaagaagccaactaagaacaagatcacgacgactgcaaagaatgagagagtgtatttgagggcaccccaaatccgttggcccaaagtttggtccccctcctcggtcgcaacctcatcatattcctcataccagaaatatgtgaaggggatgaccagaagacagagcaaggcatccaaagagtagagaagatagtagatgatggtcaaggaataagtgattctgtccaccacatcctgtgttgcccagtcctttcgctggcctaactcggacgatgtagtcgatgataccaaagcgacatcgacaggcagcagaagcactgttgcgagaagactagtaattgagatgatgcaagccagagtgactgaaggagagcggtcacggggagtttggtagacgtagataaacactgacgccactgccagtagaatagctaccaccaccccatacacagcccagatgagggaagtctgaaggagtgccatattgaaggatagcagttcacactatgcagattgaggtctgcatcaacactcctagcaaaatactaaaggaatgatgcgaggaatgaaacttcacaaatacaccaaatatcaaaacaagaaaaatgatcttcccttccggaagctatcgcctgtgtcgtcattgatcgtctgacgctaacccattttgaggcatctacagccaagggcggtatgatttatccagcagaatagattgaccgcttaattctgccaggccagtcagctgacccgcttctgtctccgctttgcttccgcttcgaaggagctacaaacttcactgcacaagacagagatcaatctggatcttgatcttgatcgcttctcgtgttaatattgaaacttttatctgtgtcatctctttttttttgcaaagctttccattcccagttttccccctaggtttgcaattgcaatgtgcatctcaggccatatcaaaaacacaatttagctcattagcggttctctagcagtatcaagcctttcacgagctttgtcggtggacgaaaacttcaaatgcagtgctacacggagcttttaccccctacgggggtcacccatgctttggcagttcctttcatctcagcaaccaccagcaatttgattgttgtcagaacctctctattgcaggttttctctctcgttaaggtcacctcctctcaaccacagacggaagattcagagcctcattcttcacaattttctcagccagaaacaaaattagtactggaaaacgaatacccgctatccggaactgtgactgatttaagccgagtcaaaatcttgaataccaagagtggcggagaagccatattgattgcagtccgcaatgccaagcttagcttgattgagtgggaccctgagcgtcatggaatctcaacaatttccatccattactatgagcgggatgatctgacccgcagcccctgggtgcctgacctgagccggtgtgggagcattctgagcgttgacccaagcagtagatgcgcggtgttcaactttggaattcgcaatcttgctattttgccctttcatcaggcgggcgatgacttggtaatggatgactacgattcagagcttgacggagaacgcccaacaaatcagaactctggcggaggagcgcagatcgagaatggcaaagaagaatcagcacaccaaacaccctactcctcctccttcgtcctgccattgactgccttggatccttcattgctgcaccctataagtctcgcgttcctatacgaatacagggagccgacgtttggtattctatattctcaagtcgcaacctccactgctcttcttcatgaaagaaaggacgtggtattctatgctgtgtttacactggaccttgagcagcgagcttcgaccacccttctttcggtatctcgtcttcctagtgatctattcaaggtcgtggcactcccacttccagtaggaggtgccttgctccttggctcaaatgagattgttcatgtggaccaagccggtaaaaccaatgcggtgggagtcaacgaattttcaaggcaggtttctacattttcaatgaccgaccaatcggacttggcgttccgcctcgaacgctgcgtggttgagcgacttggtggtggtagcggtgacctgctcctggctcttgcatccggcgacatggcactaatcaaattcaaacttgatggtcgatctgtctccggtatcactgttcacccccttccagcgcatgcaggtggagatattttgaagtcggccgcctcatgctccacctgtctcggggatcgaaacgtcttcatcggcagcgaagatgccgactcggtgctcctagaatggtcgcattcatccgcctccactaaaaaatctcggcttgaatcaaaacaagcagccgatggtcatgatgatctgtcggaagatgatgaccagatggaggatgatgacctttattcctctgcgcctgggtcgacacaagtcgataatcgcatgggaaccgacaactcaacccccgaattttataactttcgactgaacgatcaactgtctagcattgggccactgagggacctcactttgggcaaagctttctcgaatacgaatggcaaaagccaatctccaagtgaaaccgttgccgcagaactggatttggtggcatctcagggttcagatagaggcggcggcttggtagtcatcaaacgtgaaattgatcctttgactatcatgtctctgaaagccgatgatgcggatggtgtttggtcagctagtgtcacaaaaaagagaggagctcccagcacagacaatccctcctgtcaatatgtgattatctctcggcctacggatttggagcaggaggtgaacgagctcttcgtcgtggaagaacaaaccttgaagcctttcaaagcacccgagttcaacccaaatgaagattgcacggttgatattgggtctttggcagggggtactcgtctggttcaggtcctgcagaatgaagtcagaagctacgacataggtacatttcaatttagcgtgctagcaaacattgcataagctaattgtgaaactctacagatctcggattgtcacagatttaccccgtttgggatgaagacaccagtgatgagcgtgcggctgtgagcgcaagctttgtggatccttatcttgtgattattcgggatgattcatcggtattgcttctgcaggcggataagagtggtgacctcgatgaagttccgctttcagatgagattagcttgtcacaatggcgctccggctgcctttatcacgataattcacagtcattcagcgttgcaggctcatcgtcgaaggactttccagaaggcgaaatgattttattcctattgaatctggagtataagctatcggtaggtcgtcgcgaccaggaatttcaggcgttggttctgacttgcaatacagattttccgactttctagcatgaagttgatcgcgataattgaaggcgtcgactgcctaccacccgtattatcgaccgagccgcccaaacgatctaatactcgggaaatactgacagaatttgtggttgccgatcttggtgatagttctagtatttcaccttatctgattgtaagaaccttttgtcagtccatcgctttctctgctctctgactcatgcatttaggttcgaaccgaaaatgacgatctcgtgttctacaaaccaagcctaatcccggcaaaggctggccatgagtcgtctcgtcgcttgcaattattccgagagtcaaatcatgttctgccaaaaagttcaggggaggtatcctcccaaatacagaagcaacagcgattgagaccgctgagggttcttcctaataactcagggtttagcaccatctttatgccgggagcttcatcaagctttgtctttaggacagcaaagagctcaccgcacatcattcgtcttcgaggaggctttacacgttggctaagttcctttgattcggccaacactggctgtgaaaatgggttcatttacgttgattctcaggtaaggttcttcattcggagttgtgatgccatgtatattcactaattctctctttgtagagctgtatccgggtttgtcaactaccttcccaaacccaatttgactatccgtggacattgcggaagattccaattgaagagcaagtcgatttcttggcctactcgacgtcttctgagacgtatgttctcggcacaagccatcaaggagacttcaagttgccggagggtgatgacttgcaccctgagtggcggaatgaaggttcgtgtttgcttcaagcgtttcccatcatgctgtgctaatttaatcctaagagttatcattctgtccgaaaattcccgaaagtagcatcaaggtcgtcagtcctaagacatggaccattattgacaggtaaaaacgcccacaaagctcgagtcatgacgagtccgaatactaatatttatagttaccctctggatcccgatgagcaggtgaccgcggtgaaaaacgtgaacattgaggtctcggagaatacgcacgagcggagggatctaatcgtcgtcggaacggcgattgctaaaggggaagatatgccagctcgcgggacgatctatgtctttgatgtgatccaagtggctccggaccccgaaaagccagagacaggccgcaaactcaagctaattggcaaggagtcagtgaagggtgcagtgaccgctctgtctggcatcggtggtcaagggttcataatcgtcgcccagggacagaagtgcatggtacgaggtctcaaggaagacgggagccttcttcccgttgcatttatggacatgcaatgctacgtcgatgtcgcaaaagagctcaagggtaccggcatggttatcctgggagatgccgtgaaaggactctggttcgccggctactcagaggagccatatagaatgacactcttcggcaaggaccccgaatacctggaggtggtggcagcggacttcctcccggatgggaacaagctgtacatgctagtcgccgacagcgactgcaacctgcacgtcctgcaatacgaccccgaagaccccaagtcctccaatggcgaccgactcctcagccgaagcaaattctacaccggtaacttcgcatcatcggtaacgcttctacctcgcacagcagtttcatcggaactcgccgagtcatccgaagaagcaatggacgtggatgagaccttcgccagacatcaggttctcatcacttcgcaaaacgggtctttggcgcttgtgacatcagtggctgaggagacataccgtcgactgtcggcactacagtctcagctgatcaacaccgtcgaccaccctgccggtctgaacccacgtgctttccgggcgattgaaagtgatggcgctgcgggccggggtatggttgatggcaatctattgcgtctatggctgaatatgggcaagcagcggcaggctgagattgcgggtcgggtcggcgcggcggagtgggagatcagggctgatctggagaccattggcggtgatggactcggctatttatgatgccggcaacagacgcctttcggtgcattagtttagagggaaattccaaaaacggactcactgggtgagcttactcttgcagtttgatcctatcatgtctacgtctccgtaagataaaagagaagggtcagcccaagataggatttcaatatattgatggcacgagaacatgtatagctgaagttctctcggccacaagatcaagtaaatagcgtaatatcataacacaatgggatataactaaaccacacaaaaggagacacagatagaaaaaaaagagaccccagtgccaatcccaatccagtccaacgtgggtaatccaagtaaatccaagtaaatccaaaaacccagccaatccctaaatccacaaaacaaaagagataaatcaagacaaaacaccgcattcgccattctcgccttgcacgattcgaattcaaagataagaatcaaatgcttgaaatcattcgtgcctcccatgagcatcaatatcagtaacacattcagcatgtcagcttggagtcaaccatattttgtgcttcgtgttctatgggcaaacacaaagccaagtctaaaaaacgtcaagaaacaccaaccccagggtgataatgcagatgcgagaaggaaaaggacaaacgccactcagcgccattaccccagcatcccagtgctggggagtttagaacacatcttctgcggtaaagtaccgcttattccggcctctggccacaaatttcatctccggcatgttggtgtgatgcactacatgtggtcgatagacagcgtcgacaggggcttgccattcatccatgccgagggggaagtactcatagagaagatcatcgttttcgttcgggaaggggagcgacgatgcgaatgactggggcaggttggcagtctctagcaagggcatagatgaagcaacgctccgcgagggggtctgggagacagcatgcgagagcttgcgcatcttagaaggcgggaccgactggtcaagactcagggatcgctgatgtgacaactcggcagcgaaaggggacaccatcttttgctcaagatgaaggttatggtcaccgctctcttcctcgtctagcaatgacagattgatcggtgcagcggccgctgtcgtggaattgactcgacgatgtgagtcagtcgcctgggagagttgctccgggctggattgacggaacatggacttcggggcatgagacatgacattgttcgacgtggactgtgggataggggtccaatccggcgtcgctttgctctgctgcataatgctcggcgggggaacagacgttgtttcaggagagctgctctgcgcggctgtcttcgtcttggctggagtcacgctggcacgccgcgggacggagtcgctggttggcgtgcggttcacggcggaattcgaggagttggcctgattcttccgggaagcggccgcactcccactgagggggagatctttgcgtgactggaagttgcgtgggctgcggccacgaacgatgacggggcctgactgtacctcggagatggagatcttcgcacccgtggataaagtcgcgaccaccttgagtcggacgacgaagtgttgctgtagctcctttcggcgaccattgttggcggtcgcaacacggaattgtagacgtttccaagcgatagggaaggtagcatagtccgagtccagatcctgaccggccatgatgtccaagggaattgggggaggctccttctcgatcttagcgccagtgctagggttgttctcctcgggcgccgtgccagaattagcggccgccgctgagggggtcttccatggcaccgagataatcttcaccgggtttccctccacagattcggtggctgatacggtgagttcctgggcgaggatgggaattcgatcgccttggtcggtcatgatatagcgcatcccgcgaggcaaagttaccgagccggtaatttggaacaaattgcgacgataacacgtcaactcggcaccttgttgcggcggggcattttccgaaggggatgttgtatagggggactcggcgagaaaaaacatcccatgtaactgggcggacaccgataaggatgttcggcgcatggaatagtcgaggagcgtaaagtgatacaccggtagcgaaaagcttagcagcttgttgttgtggtcgatcgatgagtcctggggttgttcctggggcgctgggtcaaagggcgccaccatctcggtgaaagggtcatcgtatgcggaagagaaacgcctcagttgatgtgccagagtaggaggcgcgaaggtagcgagatcctcactaatgtataccaaattagcccaaccatttcccagtcgggcggagtggatgatccacccctctcgtcccacttggagatcttatcacccacctaacaaaggtctcggaatcgaagttggaacggtgatcgggtagatccaggccggacatcgcattgagatagtcggtactctgcaaattccccagggacaatggactggccatgtatggtggcatcgccatagtgtcgaagccctccatggtaagaggtgcgatacggagacacacacccgtagacgatgcggggaaggaagaagtataggattgcctcttctatataaaggcagtcgaacgagagacagaggagaagaaggaagtagactaaagggaggaaatagacaagagaaagaggtgagacgaagataagccaaggacgagtaggcaagacctggggaatgctgcaagcaacggagcggaaagataggctaaggcgggagtgaaggcggagaggacatttgagacggaaatggaaaggtcagtggagagcgaggagagcgaggagagggaggagggcgaggtattagacggaggctatagaggaaagaaagaagagcaagtgaccagagccgggagaaagagagaggaatctcgacctgcacccaaacgatcaacggattcggggaatagtggagccgcggtttttgcggagaacgaacgcagcgctgagtcagtcaccttattatttgattttatagaaaaggttttattaatgtttaaatgtttaatgttttattcggaattcccttttgattaatcggtttaatcggttttggatacagagtacggagtaggacggagtatcgcaaacgctcatgaccaatggcaattaatatccaaatccctcagcaccgatggggtaagacttgatcgccggctctcggcaatcattccccccaggccctgaagatcaaggtgttctttttatatatgatcactcccaatatagcattcattgtccacggagtactccgtacagagtacatcttcggatactacaaggacaggtaactaactataacctgagattaaatccactttaatgcatacccacctgcctattaaggtactcctgcttcgggtcccccctcctgaaaacgccacatattaataatattatcattttcagtaactcactatccttggattaggataaggatgagtaatgatgcaccttgtctgtataggtttgactagattaatagttgtctatactcgcagtattccaatcaagccatgtacctccaattgtatcacttaatacgatcataatcgcctcaaggatgatcatcatcggccgtctgacatgcatctgtaggggccaacagccatccaatcagaatatgcggcgcattggatcagaaagcggtgccccccgtacggagtactctgctggaccctgtactttggctatgagcgccccactgaaaacggcaatgataatctgcaatctgcaatctgcaatctataatcggcaatgttatcatgcatgtaatacttagataagtacactccgtacttactccgtacggagtaatacttgtagatagtgcccaatctactccgtaccgtaagtacctgcacttttttgttttcttctctcgccatcgagatttaaataaaataaaatccattgtggaaggagatacaacatacagcctggtccaggggatgtcagacggtaagagagtggcgagagaaaaagagaagcttccgcgggtttcgcatgtgagccaatggagaagtctgtgcatttacccgattcgattattaccgaggcaattccttctaattcttcttccggcacgtttcccgatgcagcctacaaagtataccaaggttctgaccacgggagccatccacggacatgacgtcctcgttccaaggttctagccttcgaaggttcgaaggttccaaggttggaagctccagccctgggctttcaacggtgccgattaacctttgggtttgggcctgagatcccgaaaagcttcatacaatatgtactgtactccgtacctgaaagatctctctgcaatattccggggggtcggagaccagaaatgtagaccttcacaacataacagacttccagttcagtttcagccaaaaaaaaaaaagagagagagaagctccgcttgtacaaccgagggatttttgacgcaaacagaaaactaaattggtttgaaactctgagccaatgaaactcatttgcccgggtcaaagtttggacccaaggcctgaggaacccgtttgggggttcgattgttgggttgtatacggaggaggagtacggagtatagaaaattagaaaatatagaaaacacattgaagagagagaaatagtctctttatatacccattcccttctaacgtcacattggaaatgacaaagaccaagacacaatactccccaacacagaccttgttctttttttcttttacctaaagtgcgccaaagcggagttccgttcgaagccctaaaacccagaagatgtgcctgtgcgaaggacgtccaacggagctccggaccaatcagagctcggggcttaattgtgatgccttgggaaagctaaagggaattagaattaatctcaatttccccacaggttgaatgaaggaactgatagccgagtatatttgtatacatataaaatacatacagaatatcccaattgcagttctatctgtgtatgtggtcagagatgtatttgtttggaccagatgacgccaggactgactttctgtcctaccccggacctaactgcccaagaatcaaagatgtgtgaaaagaaactcctcggaagaaaccgttactggatcgggtgaaacaaagatggaggaaatggagaagaaacagaaaactggatagaatagatcccaaacccaatgcgatatggatatcataaacgcgaacagaaacgcaaagagaaagaaaagcagaatcgaaccaagttgatcaagagtcttctacgcgtgcatcatcgtccacgaagcggcgtcacagttcacttcctcaaaactatgtagcatagtgaagcccatcatcgagagattgtcgaagttgccgtcaccatcgacctattccagtgttagaagataaccggggaaaaggaacaagcccaaaaaaacatacacagtccataaccacggcatcggcactcagcttccggatctgcttgatagctagcaggaccaggccctgcattaccgtagagtaatgttcgccacaaggagaaatcaccggagacgaaatgcctccgacggaagcctgggtggcgcgcaacacgggcatgtgctccgccaaagcggatcgctcattgtaaatcacgatactcccgagtataaccccgtcggagggccgcttggcccggatgatcccgcaattaggcgccccgcccagagccatgcggtagatgtcggccacgccctgccgcgcatacgttttgatgtggtcgagaatcgcgggcgcaaagtcccagccatatacgagatcgtatgtgacctcggcattctgcagagtcgccgtgagcccctcgggcggcacccatgtcgacaggttgcgcatgatcacgctgcacactggtcgcgaaagcgccgtgttccaccccatgttcgcgaaccactgccgcagccgcttgcgctccacagggttgacggtcgggatgccaaggtagatccctggtaatcgggatcctagctggaagcgtttcatgccggtccgctggagcagagtccgaatcgcgcggctgtgaagggaatgtccgattgagagtttccttcgagatgggtctacgatcagacatgcaatcacaccggtgcccgtggatcgaaagaagtaggtcgcgcagaacccgtagagggcatgcgtgctactgttccggacaacaaaatgggcttcgtcgatatcctccttccggagcaagaagctgctagcggtagctccaagaagttctgacggctggcctagtgtacagtcgacacggatagtgtcgagcagggcatccagcgcgaaagagtcgcgatcctcgttccaattctcgacaagccagtgctgtcgagactgatgaatcttctgcgttcgcccaatggagccaggcagggccgctgaaggtgtcaagtcgccatacaagaccttgaccaatgcctggagggcagtttccgtgaagtcatacgtgcatatgtaagtaccaattgaggaatccatggcaaaatcatatggcgagctaactgccaccacaatcaatggtttcgcgcgacgttcgccagatggggtatactgcgattggcagatcatggcgacgtgttttgagaacccttgctggtagagattgcgattggcatcggccgtgacaactactacagcactcgctctttgaatgaggtcgtcgtggatgggacgcacgccattggaagtataggaggtgtgcaacacgcgcccgttcctctgccgcgagagtgatcgtccaagttctttgaagaccccctctccactcagaatcgaggaggttcgttccgagcataatggatccagtgacccacgcgcagactctgcgaccgagagagaaaccgctgatgttgggaggggcttgaccagcggcgtcagaagcaaaagttcttcgtctggctcgatgacattggacaatggaagtaaattattcttatctctcatcactgtgatggaagagttgtaggctcgggtggaaaggttggtatgcgagggttgcatctgcgtaagtgaagaaagccccggagggttcagtgcctgttcccacgaagtacaccgcgccttcaaatccaaaacgcggcgcaacgattgttcaatccgctgacggctgatgataccgttctccacgccgagtttcaacccgttgatagcttcctgttggacggggaatgaccgacataaaagcatgacgtcgcagccggcgttcttcgccatcactgtgccacctcctactccaatgttatgtgtgagcgcctccatctccaagcattcggaaacgaccaccccttgaaactggagatcctttctcaatagctcgttaaccacctgatcactcaggcacgcgtgcatcacgttcatcccagccgatgacaatgagacacctcccactatcatggcatccaggccctggttgatagcgttgcgaaagggcacaagcgcgttgagactgagttgctctagggattccgtaataattggaacatccgtcggggagccgagaaattccaaattaccataggacggaaagtgttttccacaagttactaaacctgcttcttgataccctttcatgaactggacaccatattgagacgcctcttggggatcgtcgccagcggtacgaacgcctaatggttgatttcgcacattggtcaaaacatccaaaacggggcccaatatccaattgaccccaacggccttgagctcctgtgctgtcgcgacagccacctcgtgcgctaatgacttggacccagtagctgcaatgcccatggtactagggaattggcggatatagatctcatcatacaaactgttgacgccaccattctcctgatccaaggcaattagtaacggaacaggatggcctgcatcacgcgcaatggtctgtaattccagaaccaatctagttgcatcctcggccgctgtaaacgtgtcagtgactgtctaagtagctagtgacaaagggcctttttaaagatacatttcaggtttttagcagatagcatcacggtacccaagtggtaattctcaatgagtgatcgaatctgtggattgacctcagtcccatcaaagcccatcataaagagctgacccatctgtctgtgccatgtcagcgtactccggtgtcaaatttcctaaagtggaaatagtctacatgacgctctccagattgacagttaggttccacattgaagggagataccccaacaggcagattttagggggggggaggaatggggcgagggttaacgccaataggggacgagccaagcgaaaacagtagatcgacatacctatctaggtcctcccagcccggggacagcatgccctctttccgggccatggcccgaggaggaatgcctgtagcggcccagagaggtaggatacagagggtgcagtgtcgggggatccaaggtgtggacaccgtaaacgtctgacgggtacggaatatgaagccagtgcacgcgtagtcaggtgacaagggagggttaaagggttgcaggagtcaaaattggacctcgggagctttgtctttctcccccggagccgcaaatgttggggaagagtcgggaccagagagataaggcgagagataaggagataggagcttagtattccccgctgaagggtcacgggatcttggcatttctattatgtacatagttatgtaagatttatattcagagcttggatattcagagcctatgacctgggaggtgtgaatataaagaacacgatttatagacatacatctacatagttatatagcgtagatgattgacacatgagaacatttcgatccactctgtatacacccgaagaaccgtcacgtgctttgtatgtaaccgtctccggatccattccccatcacgtgccatacataccaataccaataccaataccactgtcatacctgcaacggctacgacgctacaacgtccaaggttgcactgaacacgatattctccagcttcgtaccgacaccaccggatgcaactcctacacttcgcaatggaaccttcaaaccaccatgtgggctatggagctccatactccaatcacaacgcccacgtccttttttttccggcgtcatgtcactttgggcttgattgttgagccacatggaatacacccgagtggacattgataatcaacccgtggaatcggccgaatgaagtcaacggctatctgtccagggtgcggtagcccgcagacgtcaaccctctagttagataggggcaaccgtcttgcacgtggctttctatgcgacgttctttgctgtcactgtcgtacactccacccagactgtaacccataggattcctttaaccttatcgaatggtctcttttccttcctcttgatgccaactttctcctcttcctttcttcttctcccatactcctcagccctactccaatccaaagacccgtgacgtaattatgtgtgtgacttcttctgtgtgtcgccttctggttctatactaacctgcttctcgataggcgtgtcattatcagagaagatcctcgtgatgtgtctgtatacattgcagactacattatcagtaagccgcagccgagatcctcgatgcgcgaatgctgagactaactcttccaaggccgcatcaagttgtttagcccgacgcccgagcagccattcgtgcttggtctgcctactggcagcagccccgagctcatctacaagatcctcgtccagcgtcatcgcgccggcgagatctccttcaagaatgtcgtgactttcaacatggtaggcgcaaaaccaatcacggggaaaaacagcccactaacctcaaatacaggatgaatatgtcgggctgcctcgcgatcaccccgagtcctaccatagcttcatgtacaagcacttcttttcccacgtggacatcccaccgcagaacattaacatccttgacggcaacgcgaccgatcttgtagccgagtgtgcatcattcgaagcacggatcgcgcgctacggtggaatcgagctcttcctgggcggagtcggaccagacggccacatcgccttcaacgagccgggctcctcgctgaccagtcgcacgcgcgtcaagacactggcctacgacaccatcctggcaaactcccgcttcttcggcggtgacacggacaaggtaccccgcatggctatgactgtcggtattcaaaccatcatggattcccgcgaagtggtgattgtagccaccggagcgcacaaggctattgccgtgcagaagggcctcgaggaaggcgtgaatcacatgtggaccctctccgctctgcagctgcaccagcacccgctcgtcgtctgcgatcgcgacgccactctcgaactcaaggtcaagaccgtgcggtacttcgagtcgattgagcaggccggcaccgatgcccgcacccagggacccgctctcgtttaccgtcctcggacctacgtcccttcccctgtacaagttaagacgcccaagtcccagcagcctactcccgatggcactcccgaaaaggtgcccaaggacctccgcatcaacactgagctgcaccgccgcgcactggaggaagaggagctcaccccagatagcatgtcctcgcgcctggtcgactcggccattggcggtatcgacggtgcactgaaaggagaccttatgtttgaccgcatgggcaccagacttaccacactctgatgggaacacctctacacttttggcattttaattcggggtttttcttttttttaaaaaaaatctttttgtgagagaacaggaatatggattctgtctctacaaatcatatatgcatgggtctgttttactggtttggcttacaggaaccatgggtgttatttaaggagtttcgctggtcaattcgattattctcgacttgatagatgagatgcaatgcgttttctaggaatcagtgatatcaaacatttagctatgataatttaaagtgtgtacaattaatttaaattttcttgtttatgcgtatcattcaggatatatatactttaaaaagggcaccttgacggtgtagactttcagcgcggatatatggttatagatgctcgagtaatagattaaagatacagaaagaactagaatatgcttgtgtgtcgctcaaattgtatattctgtacattttattctccttgcttttgggtcgtactgcatgatatattaacattatagcttggcgaagacattgaccacagtaccgctcatatcaacaagagtgctcttgttctgcagccaagcctcaataccgcggcgaccattctccacgcccagaccgctcttcttccagccaccgacggccatctcagcagggctctcgccccacgtgttaacccaggtaataccagcctgcagctggtcaatgacgcggtgagcctggttcaaatccttagtgaagacaccagcagcgagaccgagttcagtggtgttggcgcgtcgcacggcttcctcgacggtgtcatagtacaggatggacataacgggaccgaagatctcctctttaacaattgtcatggagtcagtgcaatcggtgaagatggtcggctggacccagaaaccggcctgcagatccttgggcaccgagggcttctcgacaccgccacagagcagggtggcgcggtcagactcaataccgtggcgaatgtatgcaacgaccttgtcgtagtgggctttggagctgaggggaccgaagttggtctgctcgtcaaagagcgggccagcccgcacatattggatcttctcgagcaggctcttctcgaaagcagccttcatggtgcgcgggacgaagacccgggtgccgttggtgcagacctgacccgtgctgtagaagttggccatcatggcgccattgacggcgctttccagctcagcgtctgggcagacaatcaagggactcttgccgccgagctccattgtcacgtatttcatgttgcccgaagcagtgcctgcgaccttcataccggttgccacttggccggtgaaggagaccttggcgatgagtggatggccagtcagataggcgccgacatcgccggcaccgttgatcacattgaagacaccgtcgggaaggccggcctcggtatagatttctgcaagggtctgaccgtgaagcggggtgtattcactgggtttatagatcattgtgttaccggcggccaaacaagcagcagatttccagagggcactaaatatactagtcagcttttttttttctctgctgttgcaagcgcaggatcggggaaattacatttggatggggtagttccaggcaccaatgccggcacacacacccagaggggacttcttggtgtatacccaggcatcctcacgaagttgagtggtttcaccgttcagaccaccgccaccaatgaagttggcatagtactccaaaacatcggcgccagtcgtgacgtcgacggtactagtctcagtataagccttgccggagtccaaagtctcgacgcgcgcaatttcatcgttccgctcccgtagcagtgcagcggccttttggagaattcgggcgcgaccaatcagcggggtctgcgcccacgaggggaatgcgcgatgggcagcattaatagcggcatcaacgtccgcgttggaggcaatctggatgtcggccaacggagttgccgtggcgggattgatagtctggaatgacttgccggaggtcgctgcttggaccttaccgtcataatagagctgacgaggagggaaagagagcgacatgattgtgtatatgattttccagctatgtagaaagctacaatagaagataagagaggcggaaataacacacaccgccttagaattccacaaaagggaaaaagcggagctatgtaatcctttccggttttatgtactcggtactcggccgcatagcataactagtacgtaacagccaagtaccaagtacgccatccccgtcagcggctgacggtggctgaaacggcatcgtcctggcgcggggttgttatcttttggcctttgagcttcttcttgctctctccggttagaaagtccccgggaagttcatactaagaaaggcatttcttcgccagcgggaaagtcgacgtactctatctacggaatcgcgcatcggaagcgaattcctatcatggaccggcctcctcttttccccaatctgccgagattaactcgaatgcaggaagtatgccgataaagggctgatactcggctggtaagagtcggtggacctcattatccggctcatctcgacttctctccacttttagtgatcgccaccactcagagaccccaagattcgctgagtctgacggaaagaaaaaagaaaaaaaaaaaaaaaaaagcccgaaaaaaggtttggacgaagctgagcaatccttggagattggatcgaaaggttttatccgatcagaccaccctccgaacagtttggatatttctcttttagagaccgtcctttcttctccaatcttctccaaacattctcctcactatatcggtccttgcctattcccccggtattcaatatggccaccactaacgagctcctcgccgccgatgttaacagctacgactacatcgtcgttggcggcggtaccgccggctgtgtgattgcggctcgtctggccgagtacctcccgaacaagcgcactctggttattgagggaggtcctagtgatttcatggatgatcgcgttctgaacttgaaggaatggctcagtctgctcggaggcgagcttgactacgactacggtactactgagcaaccaatgggtaagaaacttatcttttctaaatttctaaaagagcttatgctgactatccccgaaggtaacagtaatatccgtcactcccgtgcaaaggtcctgggtggttgctctagccacaacactctcatctctttccgtcccttcgagtatgattgccgtcaatgggtgtccaaaggatgtaagggctgggactttgagacctttacccgcataattgataacctgcgcaacaccatccagccggtgcatgcccgccaccgtaaccagctgtgcaaggactggatccaggcctgctctagcgctatgaacatccccgtcattgagaacttcaacgatgacatccgcaagaccggtgagctgactgagggtgtcggcttctttaacatctcctacaaccccgatgacggccgccgcagcagcgccagtgtcgcttatatccaccccattctccgtggggatgagaagcgtcctaacttgaccattctcaccaacgcttgggttaacaagatcaacattgagggtgataccgtgaccggcgttgatgttactctccagtctggtgtcaagcacactctacgtgcccagaaggagaccattctgtgtgccggggctgtcgacacccctcgtctgatgctgctctccggtcttggtccgcgtgagcagctgtccgcactcggcattcccgtcgtgaaggatattcccggtgttggtgagaacctgctagaccaccccgagagcatcatcatgtgggagctcaacagccccgtggatcacaacatgaccaccatggactctgatgccggtatcttcttgcgccgcgagctgcccgacgccgccggattcgacggcaagatcgccgacgtgatgatgcactgctaccagattccgttcaccctgaacaccactcgcctcggttacgacgagcccctgaacgccttctgcatgacccccaacattccccgtccccgctcccgtggtcgtatcttcttgacctccgccgatccctccgtgaagccctcgttggacttccgctacttcaccgaccccgagggctacgatgccgccaccatcgtggcaggcctcaaggccgctcgtgagattgccaagcagtcccccttcaaggagtggatcaagcgtgaggttgcccccggccccaaggtgcagactgatgaagagctgtccgagtacggccgtcgtgtcgcccacaccgtgtaccatcccgctggtactaccaagatgggtaacgttctcaccgaccccatggcggttgtagaccccacactgaaggtccgcggcctgaagggcatccgtatcgccgatgccggtgtcttccctgacatgcctagcatcaatcctatgttgacggtcctggccattggtgaacgtgccgccgagctgattgctggcgaggccggttggtctcgcaaccagcctcgtctgtaaagtagggcttatgacgcgtcaaggacctgatatgtatgtaaaagttgtttctttagtttggtcttaatttggtgttattatagcataggagcgagcggcgcagggcgcggaggatcgcctttgaaggcatctttccgagtcttattctccccagcgtctgcgagacagacctggtatacaattggttatggatgaacttgatatccaagaataaatttcttatcacaatttttgaaattgaaaatctaaatattggaactgaagatggatttcatgttcaatgcaaaaccacctcaaaacgcctataaccaagatgaaagctatttaacatgacagcaatataaaaaaaccaagaaacagatcgcatctaagatcgaacaccttataccttcacagcgcccttatcagtatcgtggatcttagcacccagcttccatacctgatcgactgtcaaggtcggcccagtgaaggcatcctcactctcacccaatatgatgagatcggcatcagcaccgctttctaacgtccccttaacaccctccaagccaagcagacgtgccggcgcagcagtgacagcattgatcgccgcagccgtcgacgcacccgaccaacgacggaagttgttaacacactcgataagcgtcgctgaagatccagcaatcttatccgagccctccagcgtcaaccgcgcaccgcttttaacaatccgttccccattagtccactcatagacaccgtcaggcagaccacacagacgcatagcatcggtaaccaagatcaatccatccgggtgcgcattgtacgcgatcttgatggaagtgggatgcaaatggatgccgtcggcgatcactccgtaaaacggcctacggcgctcactctgtcccagcagaccgaagatacctgggttgcggtggtagaagggccgcatggcattgaacaggtgggtgaccatgcgggcacccttgtgcgtggctgcgacagcctgttcataggttgcatcggagtggccggtggagtagatgatgttgcgcttggtgatttcgggaatgtgggccatcatgttgccgacttcgggggcagctgtgatcatcttgattgggctggcgctgcccatgttctcttcgccatagcagtagatgatgtcgtcgaaggtttccgcggcgcgcagcacttcgggcttgtggataccgttgcggttagggctgatgaaggggccttcagcgtgtgcgcctagtgactcggcgccgtcttggggcttatgagttcctgctgtggggccgagggaggggaggacctgaaatatggattagtatttcttattctcttccctggatactttgcgctctgcttaccttccagtacacctcgggggtggagctcacgagcgtcggcaggtaagaagtgacaccggttcgggccaatcctcggtttaccatgcgcaaaccctcatcgtattcctccttcgtttcacagggtacggagaaatcaaagccatgagcaccgttcaactggacatcgatcatgcccggggcaatgatacggccaccgaggtcgatgatctcatcgggggacaggtgcaatccatagaaagcctcttgatccttgaggatctttccggtcagagagtcaatccatagatctcgctcgaccaagttcgagccgcacaccaggcgacaattggtgaacttggtaatgcgcggggtagaagtcttgcccggcattatgaatgttcttatcagatcagattaagttgggtagttcgagctcgagggaaagaatacacaagaagaagggggggaaacccaagtacataaagatctagacacaatgatgtaacagtagactgcgtgacattcggcatgccgatgtggtatacaacatagcccatagtaactgttatcgttgcttatcggccttatcgttacgtgtaatctcccgtacgtatcaatactcggcccgtaaattaccaaaaccggccttgacaataccgtcacggcccaactgctacactccgcatgcgggtcgtttcccttcccttctctttctcaatgcaacatctctcgtcgtcgcattgcaaagtggatgaacatgacatttcctattatattatgactcttttctaatttccctggtttgcgcttctccagatgactccatatttccatgtttccttatctcccttgacattgtcgcattgaaaatggttactaagatgaggcaaaccgggagactcggttaagttgcatattaatttatctactaaaagtccttagcttcgtcctagtcctcttcttatttagactttctcttggcaaagggattagctatctacattcttcaccattcttcaggctgtttctcacgtggcgaacattctttcggccccttggctcgcttgttgatcgctacagcttttttacccctgtagatctttgttctctacaaccatgactgagccggggaagcaaaaagctgagaagcacacggatttgccgacacatgcaatgtctgcgtccgtatctactccgcaggacccggagtcaggtgtggaccaggcagtgataggtcccgcttggatgtacaagccactattcaagattggcaaatgggaggcaccttactttgcctcacccgaaatgcaactatatttggtgtcatttgtctgcttcttatgtcccggcatgttcaatgccgttagcggtctcggtggcggcggtcaagtgaacacccacgatgtgaacaacgccaacactgcactatacagcactttcgcagtcgtcggcttcttcgccggctccattgccaatcgcattggtctaaggctcaccctctccgtcggcgggttcgggtactttctttatgttgcctcgctcctctcgtacaatatcaaccaaaatgcgggcttcctcattttcgccggagccctgctcggtgtatgtgctggtctgctgtggtgtgctcagggcgcggtcatgttgagttatccacatgagcatgagaagggaaagtacattgctatcttctgggtgattttcaatttgggtggtgtcatcggtagcttggtacgttcacttgcatatctcgaatcctcagaaacaatatattgatatccacagatccctctcggtcaaaatatgcactcgaccgccggcaacgtcaacaatggcacctacattgccttccttgttctaatggctattggtttcgttctctgctggtgtctcgtcgattgcaagtacgtcaagcgcaaggatggctcgcgtgttatcgtgatcaagaacccgacctggaagtccgagtttttgggtctttgggagacactgatccacgattcgtacatcgtcctgatgttccccatgtttctagccagcaactggttctacgcataccatttcaacgcagtcaatctcgcctatttcaatgttcgcactcgagccctaaacagtcttctgtactggctgatgcagatggtgggtgcgtttatcttcggcaagctgttggatttgaagggtctctcgcgtccgtggcgcgccaaaatcaactttggcattctgctcgctgttaccatgggcatctggggcggaggatacgcattccagaagcgctatacccgcgaaaccaagggtctcggcacggatttcaccgatcgcggctacattggacccatgttcctgtacatgttctacggattctacgacgccgcttttcagacctgcacttattggtacatgggttctctctccaacaatagccgcaagttggccaatttcgctggtttctacaagggaatccaatctgctggcgctgccggaatgtggaggtaagcaaccattgctctttttgctctattcttcactaactaacatactttcagcttggatgcaaatgagaccgcgtacatgaccgaatttgcctcttgctggggtattctggtcggtagtatgcttattgcctcacctgtgattttcctcaaggtcaaggacagcactgccgtcgaggacgatctgcgattctccgacgaaaccgccgccgacgtgcggggccataccaacgaaatgtctccgatagataagcctcacactgaaacccatacccctactgggactctccccgactctcacgaggagactaccaaataatgagttgtcggcgagggggacaacccttaccggtcatttatcaccactcggtcaatattcgatttgatcacctttatcactacagtgtgacgaaatacaatacctgcatttacgaggcgtgtgacttttttatgctcgcgaaaaaaatcctggccacaactgcgccagggaccgtgagtatcatgttcaacaaatactcaatctccgtcaactccgttttctttaataatcttgtacatgatctgcgttggatttctctgggtgcattggctcccattcgggttgtactttaggtctgccatggtcataggagtagtctatctaatgcgtacataatgtcatatctgcaaaccacaatgctattgaatatattatcaatatctaatcaggtctgctcacgacaactcaccaaacccagaagcctttgtagccgtaggcaacggtaccgaagcctgggtatgagtcgccgtcttagggccagtcgagccagaattctgcttcaccttgtcttctcccttggtcaattcccacccattcagagtacgattaaacagctgcaacgcagccaccggctgatagtacggcacctcatgaccagactcataaacacgggtgaaagagaagttaccatactccctcgtctcgccatactcgacaccatcgacgaggaagggcgcataaccggccttctggaactgcttgctgtgcttgtacttcgccgcgagggagatggcctcgccgccgaaccagttgcagatgtagtctgcgtcgccgtagatgagagcgacgcggacgggacgggagaggatatcctctaggtcttcgaggaagttgggccagacgaagtcgccggtttgctggaaggcgaagtagacttcgttgttggattgcgtgtagtttatgtcgacgcctagggcgttcaggaccgagtctttggcgaggtagtttatgtagtagccttctggggttgggtcgtcgctcgggtggcggatgtcataggcgcctcgctcgccgaagacgtagtaggggctctctagagttagggattgtgtcagttctgggtagattttatatggagtcggggtatatcataccgacgttatctcggcacatgttggttgcctcggtgcagagtgcgaggtcggatagcgaggtgcggtttgtaagcttgcaggttgcgatttggtcctggcagccgtttggcatttcgttggcgaatctcatgtagttgtaaactgtctcgttgacctgcattatttgttagtgtgaaattagtatcatggtaactttgaagacttacagccttgatcccataggtgttgttcacggcaaattcagggtagtgcctggcttgaattccttcatcgatgataccattgatgatacccaaggtgttgaagtcgagttgaatgccgtgctgggtgccgttggcaatcttaaggttctcttcatagaagtgatcgaagaactgccagtgttagaacttcaacaaaataggagctactggttgactcacggcagggccataatgccttgaagaagtcagcaaggatatatcaatatctcgaacagacgaactcaccctccatagctttcggtccacaaattgaaactcttcgacttgatcttcgaatccagcttgggcagaccacccaggaatccctgcaggacttcccaggtagctttggcagcgagtacagttgtatcaattgcggtagcgttgatgactggatagcgaccatcaattcctgcaaaggacgggtcttcatatgaacctgtgatagggttaagagtgccggccgctttctcagcgtaggagaaacctgtgattatattagccagatgacctagaaagagaatagaatagaaagatatccataccaacacccaatggctgagagatgaatagcaaattcgagacctcattccacgaattcttgttgatataagattcattattcttgttgacaccacacggacccaattcctcgaacaatccaatcaaagagtcactgcccggtccaccatttaaccacaaggtgattggcgcattttcagggtcatggcgagcctcgaaaaaccagaagaaagtgtgctctgtgggtgagaggtccacataacccgaataggagttgacaccgggggtagtttcacaaacaccctctttgccaggctctttatagcgaatggtgacattattagccgtcttgatagtcttgacgtgtgttggatgcttgggcagctggcgacggatgagggcctccaagccctccaagctatctgagggcacggcaagcgccgccacagccggtaataatggaatccagtgggagacacgcataatgggctatttgtttaccgttacgagtgaggattaccggggcgtgctcgggataacttatagtcccagaagaggggaagtaaacaagaatcgtgcatgataagcagctcacgcaatcgacgattggcagggaaagctgaatgctaagccgggtatttacttgatctccgtgggagctccggagaaggtagcatccccgttaagaggggaaaagagtcaaagctccaccaactcagggtgagaggttcagttattcgactaggttaggcggggagggaaaagatcgacggcgctagattataccctgtaggctgtgatcgaatagcaaaagaccagacatctccatgggctaatgccaagagctgttgggctccgagacaaggatgtcgtcttccgtaaagcaaactattatgacgtgctatgtttgatagtgtattaatgtgttgagaaagtagattgagtcatataaaggtggtattgtctgcactgcaggtggtaggtggtaggaataggcctcgaggaccgggttactagggttagtagaatccacctagctatgaacgtattgcggagagtgaaagagccaatttacctggcttgagtagagtgtcacagtaggctgtgttcacaataagcaatctatatagcttggccccatcactagcgaactcatctatcagatgccaaggcgtgttactccagagccagtcgttcttggataagtccgaaacaggctaatcgatagccttggggttttaaagttgacgaagcagaagtttatctgacgttttatatgccagatgggatagtttaaatacaagagtgcgatcaattcaagatgcagaagatgaggagagaggagaagtgggggaatatgtaaccggagttgaatgcaaaccaatcaaacaagcaaatgaaacaaatgaaacaaatgaagcaaacaaggcaaacaaggcaaattaaacaacaatccgtaccctattgatgatgacagtaaatgtaatcactccgtatatatatatatagttgtagttatgcatactaatatgattcgtatatatgattatgtatactccgtaaaaagccataaatataaagaactgttagaagcctgcatcagacaatcatattatactttaactagccaccggtttcaaaatggactgcttctagagttgccgatctcactcgagctagggttgccgataatttcctattattctctttctctaggactaaacacgaactgccccaatacccacatcctgccgagtctcgtatttgccgatttgccacgtttcacactcctaacaatctggatgtctactccgtactccgtacctagatagatgcctcacttggtagataactagaaccggaagaaccattgatgcgaaattaattggtctcagagttctaaagtttggtggtttgatttgattcatttcccgatgcattggtggatgataattggctggtttcatgtatcaagtgggaatgagtgggaatatgccgaataaagaccccctggctaccgcgtactaatactaacaagccccataatgaggacaaatagaattacgcagcaatttcctctcttctccgatacatctttgtcgaaaggggccatcagatcgtttatttcgctgggttacagtgtttcactggtgaaacatctccagacttcaatgttcccagagtaagtcagatccacttctattgattctctttctgatccgatataaagtagtaccttgcataatcacaccagccatcttcaccatgactaaacccgggctggttgcgattgtgattttataaatggataggggcattgcactatatcaagctcgaaaaattgtctaaagtgtgcatcctcgattgtatacttgggacgagtgttagatcaccatggactctatggagactcatgcgacgcccaaggatgctgagaatgagcaatcaatcactcagagaacatccagtccttacccatcccatcccattgcccagctccagggcccgtttgaggaatcaattgtggaaaccaccgatggttctgtaaataaatgggttgtggacatcgacgcgcaaacacggcggcgcgatctacttgagaatgacgaatacgagcggctttgtgggcgaaaatggcgccaaagggcatctgaaaagtgaaaactcatcctcctgtcaagcatgatcaaatcgaactaatccaaccatacagataccatccattctggaaattgatttcccaaatggtcttcggagttcatctcctggccaagagtctagcgaaatccgaagactcagtcatgagaattctacagaaacatgtggatgagttagatggctttctggaaaggaccactgaagactttatgatcgtccgactagacgttcgcactcgaattcagtatctcagagtaccgctaggaaatctcgatgtcttcgatgagatgctggaagaccggaatttccggctatcgattgtcgcctataacgatcagatcgaacattctattgagagattcaccctttccatcacggactcgctcaaagacctacaaaaggcgaaggaggctatgagtgcactatggttctacttccggaaacttacagacgaggattgcttcaagtccgagagcctcaagctttttcatcaggccatgatggacaacatggagggctggattgtcgctatctcaaaacttcgtcgacggggcactgctctccaaaaggccctgacccaacttggcttggcgactacagaaatgcaacgacgagtcggagtagcaagtagaaaggatgtggtgagttaggcttgattgggccttaagattctagcgctaactatcacagcgatcatttattaaacagaccagcaagaccgcaaatcgaaacaaatcaatcaaacaaagactgttcgataaaggacgccccaaatcagaaaaaccacttcctcgcgatccattatcgaagccaaagaggacatcaacggcttctaaacaggttgagaatccttctgctccagctagagctcaaaccgacactcctacggatctacccatcccgagcgatggcattcggcgcaggatcatgagtcgggctagatcatgcagtgctcttatagcagaagccagcgcaggcgccggcaccgaatcaccacctcccctcccatcaacatccggaaagctcaaacgcaagctctccaagcccttcctactcaaacgatccgccagcgtgaaaatcgacttgacccaaagtcgaccgaaaacagcaccatcacaaccctcacgactttcacgcaatatctccatagaacagctccgagcattctgctccacaccacgccctcaaaccggacaatctagagtcaaatcacccacacaagcgcgacaggaggcccacaaccaactcacgaatggccgagagaacatgaaggagcagatatcccaattcctcaagacggaccgcgtggtcgaagcatgggataacgtatccaagaacacatgctgtacactcccgattaccaagacaaaagactggcctagcagcgtcttccaagccaagtcttccaccctagaaaataagggcaacgacacaaacccggacctggacagacagatgtcttggatacaggggaaattcgacgtattacctacatactcattcaaaacaaaacctgacatgtcgccccggatccatgttctatcggtgcagatgacccatgacaacgctaatggggtgactgagcgagaggcgagtttggatttgaaaagtgaattcgggtcgagtattactgcgttgccggttgtaccgtcatccattccaccggttagttgataagagggttttcgatattcatggttgttgacattattatatagattgcactggagcatcgatctagattgattgactgtgctcaaggttgagtatatatgaaagtgtagtacattggacttatagagatatataattatagagaattaaagtgaatatgcatagccatgtgtattaataatataatatgtaactaactattcgtctttcgtatatataccacgtactccggattcgtatagtctcagccctgcccgactgcgccacaatggagattctttcacttttctttctctttctcttccttttttctttataaaacttcgaatacattcctcttcctctttctagtgatttcctttcttttacaaatataaaaaaagtaccaagtaccggtaccaatctgccccatacacaatagggcggccagccaagtcactgtaccttccccaaccccccagactgcagcctaaactgccaaggacccaccgctctcaccagcccccgttgacgtcgaacatctcacatcctttgggattcttacattcttctctttcggcttcagattcttcactttattacttctgtggtcgcaaataattagcccgtcatgccagccctatatcctcgatactggtaggtgctatgatgactcccgtcaagagacatatcactgatccgttacagctctggttactttggggataatgactgctattccacctgggactcttggggtcgctgggtagcgttcgccgtgatcgtcggtgtagccttcctaatcttcttcggtttcgcgtgagtcttacctaattctcttctatgcgatgtctcgcgattttaacaagcttgtcacagatgcttcaacgcacgccgtcgccgaaatcatggccaacgccctctcacaggaacgggatggatggctcctcctccgggccctcctccgccaaatcaacccatctaccagcaacccccatatggcgacccctactaccagcaaaatgcgccccctcaatacaccccgaaccctcagaactacggctactttggtgcgcaaaacgcaccaccacaacagcaaggcatcgagttgcagcagcctccgaatgcgtacactgccaacagtccccacggatatgcgccgcctcctggtccgccgcccaacggcaataaggactaaactctacatcattttaaagcttaatacgcatggctttgaaggtcttccgatattgcatgcctctcgatgaatttgccggaagttaatggtttacggcgtttttaactgcgaaatgtggtctttttttggatttggtcgcatacccacatgggtggatgtttttcctttactacttaatgcttcatgtcttccatgtcacatttaacccaagttcagctgaatttaagtatttggtttgcagcctgagatccctgaaacagcgggacttgagggttatagttctatgttctctcgtacatcgtttctctttaatatatcttggacggtcaaacttgaactgaactgaattagaattgctctttcaaagctaccggctctttttattgattcactgggacatcgtgtgattcgatcacgcggtttcggagcagaagaacagaaggtccaattgatacatggtttgagattggaccagttgaactcgctaatttaacaactcaattttcaattgtaaaccggtctcgcaatatattcagattgatatatttgatatagcgggctgattagtgccccaggcaccccatctccgccctccgccctatatcgggctccgctctgcgttttctcaatgcgacaacctctgagcccatggatatcgacgacattctcgcgtcagtggatcgcggtccaggcgccagcctggaatccgcagcgctagatcaccagctcctcacgcgcttctgggtagctgaacgcgccgtgtcggaggtactaccgtggccggcgccactgatggagcgcataatggatcgcgtgcggatacaggtacacagcaccttcacagcactccctaaatccaaatcactaatgaaaccaaatacctacagatcgaaacaatcgaagacctagccgcatcctcagaaacaaccccaacaaccggaaacacgcacaaccccaatctcaacctccgcctctcaatcctccaaaccgacctcgcccgcagtcaatacatagtacgcagtcttctgcgagccagactggccaaaataacaaaatacagcatgcactatctagtcctgctcgcctcgcgcaacaaaaaccccctcgcatcgcaaacacaatcaaccgcctcctcacagaacccgaaccagcagcccgaggactccgtgccggacatatcagagctgacggatcttgcgccgctgtcggagccggaatcgtcgttcctgcatgcgcaccagacgctcctggcgggccactatgcggggtcgttcatgggcgcgttcccgcggcagctgaggcggttggatgataatgccggtgggacgagtatgatccaggggccagagttgaaagaggttgtttttgttcggtgtcttggggtggaagttcctgttgttgttggaggggaggacgaggaatatgatacgggggttacgatgcgaatgggggatgtttgggttgtgagatgggaaggagttaaggcggcttggggaagaggggaggtggaattattgtgagtcctggagtcttctagactggtttgatattcaacttcatcatagcggagtggcgttatttgggttattttatgatatattttccctacttttgcgggacttgattcaacgatgtatgtatgtcctaccaaggcggtttccattggccgtgctagtaaatatcaaatactaaatcggatggttttctatagctatttcatttctttcaatcccctaaaagacgccaatcgctaagctcagagaaacgcaagcactccgaaagcagacacatataccgagatgcgaggacaccccagatcataaaatcataacaaaccagaaaagaagtagaccagatagaaggcagatgccatcaccgagatcgtatgacattatgcgacatacccgtaggtgggcggatcttcagagattcgctccaggtattcgcggtcaatcagactctcaatgcgacgcttgatcatgttcacgtctgggacaaagcgggcggaaagttgcgaaagagtctcgttcattagttgagcatgagtaagcgttttgcgttgtctgccagatattagttcgtcagatcatatacgaggattatgtgggagtcatacttcataatgcggacgatagcagcttcgatggtaccgttgcgctcgtcattcattttcttttcagtgatcttgcgctgatcttggttctcgactttgttggcaccgccgctgacaactccgatacgcactttcacaaaggggctgtggaaatcattgttgaaaaagaagcggtcagtgggcctcacatccttgctcataggctccttcttcaacactcgagtctttggggcaaccgcaagcgattgcaagttgcggatcaagtcgtggtcttgtatcagggtgcgagttttgatctcgtcataggtgaggccttcgccgtctgggatgtcgttgaataataacaagatgatcatggcgtatgttgacacgttgagttcatagcgctggacctttccattggtgcgtacaaaggtggttcgaagatcgccagtgcccatgctagcctgccacgacagtttgcggccactgtgcttgtcgagataaaatctctcaaagctttgcttcagtgtatcaatctcccgtgggaaaatgcaaggcaattggaccgttccctctttggctcccatgatttccattggccacatcgtactggtgaggacgttgatctccaggtccacgggtttctggtcaggatcaccactgcgcgcaatgtgctccttgtaattggtggtaaggtcttccgagatggtcatatccttgaacatggactcaatgcgttgagtaaactggttaccgacctctaacttcatcttcgaaatcatctgtctctctgcatccatgctgacagagcgtttcatcagaagacggcgtgatagatgtttcttataataagtttcaaatagatccttgtccttgatgtaccgcaacagtgtaattccgctgtctaggagaacgtctacctcgctttctgtctttcccttaatgcccttcttcaggttttcatcgaagaagagagataggtactcggaatttcgcgagttttggttgatgaagttggcgaagctcgccccaattgagccttgcatgccctggtccgaggcgaaggcattctcccaaatgtcatcgaatttccgcttgaggatgagaatgtcatcgacccagcggattgctgacactgtttgctgactctgaggcttttctttgtcttttcccttcgccggctttttctctttttcaccatctttctctgctgatggggctggggcttgtggtaagagtatagacgaagcattgatttctttgcccatttccacaattcgcttgctgaccatgtttgtcaaagcttgcttcttcttgtcgactcttttattaagcgtgtaaatattccgtaacccctccaactgatcgtgatccagcatttgccggacgccggtcccctcgaaattgacgacctcgtcaatattgttccggatgagctcctcgtcaagcaactcaaggaccttcggctctgtcgtgaccgccaacatataacggcatcgctcctcctcttcagtgattcgctgggttgcgaatcggcaaaacatggtagcatctcccatttccaagagccgttgcccttctgtccggtagaactccttacttgtttcgagaaaggctggttcaaactcagtcagataaagttttgagctctcctcctctgtaacagtttcgtagaggccctccaacatttggatgcaatgccgaatgagcggccgttcaataatgtgcccagaacgttccagttggatcatgaatagtatggtggattcgagtacatccatgacagtcaaatcagagccggcacggacgggagctcgtaggatatggtctcggaatagagccaagcaggcaacgtagatggatgggtgagtacggcttgccaccatacggtcctgcgcaaaaagttagcgcattgtatcaataccgtagagcgtgaaaaccccaccatatacatcagaacatcggtaaccatgcccatgcccaattgatgatcttcccaggcatccttcaggacggtgagaaacttctcccccgcctccctcctctcacttgactggtcctgcgcatcggtggatttttgcgcccgcacgagggtcgaagagattgaatcaataatgtgggttctgacattggttttcaaccagtcctgctctagttgtttgacttgttcgtaaagatcggaagcccgcatcatcaacacgatcttgtaggcatggcggtagagctcttcaaatgccagggttgaggcatttttagtattaatttcagtcaaggatgacgagaggactgtccagatagaatcgaaatcttcggtattggcatgggagactccctagaagtatagttagtgaatagcctcataagtttaaccccgcatggtcaacgaactctgcgaggagctcgaatcttgtgacgagccctcattgctgccatcttgaaggcaatgcagtaagtccaagagaaagtgagtgaatagagaacttaacaaaaaaaaaaaaggtgaagaaagaatgcgctcttctctccgcggaggccaaccccggaaattctaaagttccggctgtcactgaccgagcatcgtcatttcacctgtgctttttctttttctctcaagttttgtctgaagcttgcctgaatactttctctctgacttgcaaatatctctactatctttggacttatttctctgtcagctttcaaacacttatcaccatgcgccctttcaccccgggtctccgcccattgaatgcccttctgtcgcaagcacagtcatacactactgttgcgcgcatacaatcttcacgcttcctctcaacacaatctttctctctaaactcagctcgcccatcatctcttctcccccgctcgcagcgtatcttcctccaaacccaaatccgatacaactcccgcgctcctcaccctctcaccgaatcacccaagacacccaagagtcaggcggagcaggaggctgaatgggaagcgcggaaccaggagcgtcgcaaggatgaggaagcctatcgcattacattcacgtgtaagccgtgcggtcatcgctcttcccaccgcatgtccaagcaaggctaccatcgtgggactgtgcttatccaatgtcctgagtgtgactcgcgccatgtcatgagtgatcaccttggtgtcttctttgacaagaagacaactctggaagaccttttgaaagagaaaggtcagacattgacccacggccacacggagggcaacctggaattctgggaggatgggtctgtgaagagctatgacttggagggcaaggagatactgggagcaagcgatgagggtaagtcggcttgacttcattcgaagtgaggttcctgcatagattattggtggagtcggtgcatattaggtgttttgtttgtcttgttggatgtgtatattatggcgatgaaagactctctactcccagcatggcaggatccaagcatcgacgagaagaaggatatatattgggggctttgtacattaaaaatcactttgactgaattctcagtcaactcttaattttcaaggacaaccctatcttcaaagacgacatattgagaaaacataagattgtgtacagaagaaatcaaattgttctgagaaggtatatacaatgcaagtataaatgtagtaatccattccaccaaaacgcccagttttttgtatgccaataacaccatttcatgacacatgcaaatagatgtcaaatcctctaccaaccgcgtctctttccacggtgctccaagcccttctcacggcgcttgtctctcttccgctcgttcttcttcatcttatcacgtccgtgcttctcagggtcagcaacagcgtcgatgcgacgcttagcccgtcgtccttcacggcgttccttgatagccgcctggactctagatatatgctccacgtactcggtggtgccgagtttcttctggagaagatctaagacctcgtgacagttggagacgagggatttgtacgtgttctggaaggtctcgtccgaggagcgtggcgccgggatcgatggatccgtcagatgctgcaggggaatgagaataacgcgcagagaaggccggatctgctcaacctcgatgtggcggataagtgcggcaagaagtgtgatggaggctgtcttgggaatgagggcttctgctcgaccggagatagtttcccgtcgcaaaagggaggaaatctgcttgaaaatgtagtggatggcagatctgttgtattccaccttggcttcctcctttgcctctccttcagcttcactgccagcatcctcatcctcgtcctcatcttcggattcaacatcctcacctgccagctttggaagctcgagtccgttttgagaacagcaacgtccaaggaagacagtgttgcgtacactctgcatagcaagttcctcggcaatgcccggggtacgcagactgcgaagactggcgcgaagaagctgcagcatagctggcttgtctatggcgagaccggaacttccagtcaagggaagggaagcgtaacccgcagcggcatttgtcttggctagatcagccatccacaagcctacaaggttcgcagcacaggtcttgacccatgcgtgtgggaagaacaggcactcttggacagacgtccagatagaagcgcattgcgggctcagagcaagtgtggaagccgtcttgcaaagctttgtgaaaagttgcaaggcatagtaaagagcttcccaattgccattctcatgatcatctagaacgggctgcatcaagccagggaggattccgatgacaaatcgagcctgtttatctttctcggtctgctcggcctcgaagtagatgcgcatggcctgcaatccaatactgcataaagccatgttgtcagtctgctccaaccacgaccgaaggggagtaaggatagtcttcatctgctcccgatccgcacgattgaagaactctcctagcaatgtaccagccaactcgcggcattccggcgagtcgtcattcgccatagcaagaacgataggcaggaagaaggtgctaataatatcttgtgccaattctgggccggtctttgaaagaagcgcgtgcatcgcctccatgactgactgccgcccggactgatgcttgtaatccaggttctttgcgaagaaagcgagctgtttggtccatcgactctttgcctgcgggtactcaatcagaaaatgaacataggttccgcgagcaagatcccgcgcagaccgagtttggtttgtcaccatcatggtcgcgatgttgtccataagctcatacatctccggaacgacgagtttccgggacatgactgcgcggatgaagttgaaagtcacaccttggcgatctggctcctcaatgtcggaagccagacgcttgagcaagtatgcgagatgtccgtcacgaagcttggtgtcctttcgttcacgcagcatggaagaaatcaatttcagggacgcttgtgccgcttcggagtttgtgctaggagactccttaacaagcttgactgcttcggtgaaatagacgtgtgagttctcgtcaatctccggtagcggaagcttgatgatcgtggatagtaaacggagagcagaaaccttcacttcctcttgagactgaacaagcgcatcaccaatgatgggaatgaagcccgacaagttagaagctgtcaacaacgaattgaacttgttgaggatagcacgaagcacatccagcgagaaccgggtcagcttgtaaacatgtgaagatgtcgtacccctgtgctcgccccgcttagctccttgcaatcggatcaagaaccgctcctcgtatctggtcttgggcacagctgggcccgcatctggagcattgtcccgataagcctctttgatgacctcgtaacagaagactaacatatcgcgactttcggcgtcagggtttctcagaagaccgatgccaatccttcgcatgagctcatcaagcttgttgacgagcttcgaattgagcttttcgcgtaggagtgcctggagaggcctaatcaggtttgacaagtggttgatagttgagatcttagccagaagctccatagagtcgtagctcttgctgctcttgacctcctgcattttactggtgtatccttcggcatccttttcttggccgactgtgccaaaggtatcatccatcacaaccgcaaccagttctttcaaacagtaatccaaatctccttgcttgaagtgatcggtggtggtcacaagcatagagtgaacggtgaatgagagaacgtgaagctgataacctcgagcgagcacattacggagttccttgaggatgtagccgaaataaacaggacccaaaaggagagcgagctcattgagtgttttccgtgcagtatcacgagaatcctgtgctttactcttgagggttgcgcagacatctagcaggactggcgggagacgaatagccagttcttcttcggggagaatcttgagaagcttgacagtggtaatcgaagccggcaggcgcatactcatttccttctcctgcttgtggtgaatgtacttggtcaggaaaggaatgaagtttgtggtaagctctgttgacaccttcgcaagagaaggaacagtcttggcgagggtgcacatgggcagctcgacaacatccatcttatcaatttcaccatcgatctggatttctgtccctctctttcggttcattgcactagacagcgcatcggacatgcggcctagcagtctgaggatgttcttctccttttcaggcttgcttgccatgtagctgcggtatctccgaaagtttgctcggaactgaccccattccaaccattcagagagaacgccaagggtcgcaacaccttcggcaatcaggttgtgggcgttttcatcagcagcatcctcgaagatgaaatgctcaatgaggggaatgaagatggtgcccagattcgtagcctgaatgctaccttgagctgcgtctgcagccagacgtcgcaatgcacgttgccggcggtgctgttggatgtggagaatgttggtgaagaaagaggcctcttcatcatcgccgacaagaagaacgtgcatgtcctgcacagcaggtctggtggggttgagtttgacgaagtagccaatgactgcgacaacttcagagcgaataagttcagacttctgtcggatgccgtattgcaaagaggggaacagaacatcattgatgagtgcctcaaagtctgcgtctggttctgtggacgctctgtcgatgaatcgtctcagaccgaaggaggcgctagatcggatagaaagctcatcttcatccctcagatggaaaagcatgttgtagagaagaggcttccactgcttcgcgctcagagtttgagacagttcgtcgctgactgttctgaaagcctgcagacgtctggcataatcgggttcgagtcttttagttgagcgagagtttagatctgcacacaagtcggcaacaatcttgaggttctcgtcgtgcgtagcaagagcaccaaaaactcgggccaatacttctctgttcgcgtcatccttgaagtagtcgaacatcgagcacaccgcatcaaatacttgttgcgcgagctcggcatcttccttggggtcccataagggcaaaaagtgttcgagaatcttcaacaaaccagacttggttctggggctaacacgatccgcgggctgacgaagcagatatgtcgtaattccgacaagactagcggtctctttggaagattcgacgcagggagcgatcaaggaaagagtattgactccggaataaagaacgggcttcgaggggcctctcttgagaagacgaccgaggtggaagagagcgtgctccaggtagggagagaggacttcggatttgatttgctcagctgggaagtcaggcatctcttcggtttcctgtaactttttgtccgtagactgcgcaactaacggaacgagaatctcatccaagataaagaccttgacttcatcgcgggcagattcgaccgcgagacagtcaatcaccttagtcaagaccttgtcattgtgctgcaccaagtagaacgttgaccttggaacagcggcccaagtggagaacaatcgtagaaggcccgaaacaccttgtgctgtctcaatagggaattgatccagtctgctgtcaatcatctccttgaagatgatacggacgtagggagtccaatcatgattcgggacaattgagaagaccaaattgagacagcgaatacactctgaacgaatactttggagcacaggcaagaggcgttcatctgggcgatcgctaccctcgttgtaaatcgcccggcatgctcgcaccaaacagtagacaaccacatccatcgtctgcgatgcaaattcggtcatgcgggtttgaagggtctcaaaaacagtatcgatcagcttaagcagacccagctgtcttcttggggttgtcaactcttcctggaaggcagtcggatcgcactcatcattgtctttgacaacatgaacgtttgcaagaggaccaaatgaaagctgcatgaaaagcccaaagtcgtgctctgaaaggtgcgagatagttcgaagaatagtctttcgtctgccagcttggccagcggccgctgaaccagccttagagatcattcgaccatagagtagtcgaaggacaacggggaggaggacaacgcggtgctcttgttgaattagactttcttcgtcgccgacatgcacgaacactgcaagctcatctttgaatctagcctcatctaagagattaagtaggttttcttgatacgggcgtacattcggatctttccaagtgaaaaggactttcagcgcatgcttctgcagatcagaattaccatggcacaggagtcccagaactgccgcatggacctcgggtgccttaaacaagacaatggggttgaggaactgcgcgaacaaagcaagcatcgacaatcgatctcggaatccccaacgcacttgcgcatcatcagtctcagtatcttcgaccttcggctcgccagttgcgggcgcgtcatcttggtcttcgcgcaatgcccaggacaaaaacaatggcacaatctggcgcgagcgtttctcagcaacgcccggtgcagcgttcaagacacgaagtgcatgggttcgcggggaagcgggaagtatgtttgcgactgtgtggtcttgtttgaattgttgagatagcacatgatacggatcctctgtgctcttggtatttgcggcgagtgttttttcaatcttggcgacattgtaacactggaagtggctcttgacgaaagagctttcgtcgtcttctgttggagtgtcgctggacgcttcggaatcccgctctgacagccactggatagacaaatcggacacaatcttctcaccctggggattttcgctaatggtctttaatgcagcagcagagtcatcccacaatggggccaacttcttcgagaacaatccgaagcaaaagtaagggaccagggtggccatccatctgcggtgagcaatttgggggtagagaatcgcaagtttgcggatatgcatagagatagttctcacggagtccattgtcagcgggctctcttcgacttggatggctaattccacgggcgaggggtcgtctttggcaaggcgaacaattaattcccgtagaatctgaagagataccagcctcagcctgtgcgatgggcttgccaggttcacaattaaatcttgagcaaaggcttccagggtgggatgttcgaggtctgcggattctgggagagaggaaatgaaagtaagagcaccctccaaaaagactggcaggcgagagaattttgtagcagtggcgatgattggtttcaagaggctcgagtcaagctctccaactttgttagcgagttcgacatacgtcttgaaaccttgaccaaggaaaaacactaggcccttcgtctcggcgttattgccttcagctgcaccatcttggaacgctgataggaggttactatgcaacttagagaccatcttggaaattgtagcagaatctgcaaacaaagagatagcggctggaagcttcaccagcgcattcaagaaggcttcatcttttgtggggtattccaatgaatcagtgatgcgggatttgaaggcatccgggcaggaaatgtagccaggttgcgagatctcggacgtgatgcaaccagcctcatgcaggcgtaacagggtgaaacaagtctcccactcggatttttgccatgatgaattaataaacttctggaaaggcgaaagaagcaagctctggaatcgctctgatccccactctgagaatgttgcgcagaagaataggaaatattttgaaagctggcctgtagacactaggtctataatagggcgaaggaaaggtagtaactcgtccatgggggacatttgaaaggcatatgcaacgctggtaaggatctgtaatatcgtttctgatgatacatcagatgcggacacctgctggaggagggacagttgaatctgatgaacgatcttccagttttggattctgacacccttgcgagtggtcacaagcaggaacattatacggcagcactccgagagattgagattcggggttgattttgaacgatcttcgatataagccttgattgtgtcgagaatgggaccgaaggtatcgggagtcgtggcgtggacaagactgacaatcagaccgaatataacttctgcaggatcattgtggttttcactagtcggcggcatctggcttagaacgcaactgaggatgtccatgccattggagtgaagcccgttattgactcccctgatagcatcggagaacatgttcatcaatccttccctgtagttctcggtatccttgttgtcgtcggcggccttcgagatatcgtcgaaaaggaacgagaccgcagtctcgaggggtgctttgttcttgtagtaaacaagaccggcctttctaataaggaacgacatcgactcagcggcgaacctcgccacaaatggcttttgtcgttcttttccgagatatggagtcattatacccagcagctgccgtaggtctggtaccaacagacgagaaaggaatttgaagatccatgcaagacaggtgaaactccattcaacgacctcaatatcgggatgtgttgccgcaacggacgacaccagtgtcactgccgtagcaaaatgtttttcgaacttgacacccaggtcccgagcaaattgcgcaagcaagctcaatagcggctccatagagagctggtctctcttctcgatgaattccaccaatagacccataatcttttcttcatgatacagaacttgcgcaaagctctcggaaagagggttgacacgccgtacaaattgtgtaaagttgtctgaaaggttcatctcgaaccagtgatcgagagccgctcggaaataagaagatgtttcgtcttcatcttcgccgaaactggcgcggcgcacgcggtggatcgggtcgattttgagcttggtgatgcgtgatgaaaagccctcgaatcggtggttctttgtggtttcggtgcctgtttttaggcgcctaacaggctttgattttgtgcctgtccccaccatcttgacgggtctgacgagcagcactgttcgtgagaaaggtactggctatttttttttggctgatccgcatggaatacaaaaaagttattcgggacgggatttatttattccgaggccgatatctacttacatcacgtgctgataaggtggcccaagctcctgctttcgagaaacccgaggtgttctatcctgcgcctagttgcatgtagtcgatctttggtggcagctttggacagttcgggtgtttgaaaaatcttatacttttcgggtcttttgtctgtccgtttccccccattttggctatcttttatcaaattatttcaacatcttcctgtaccgagtcgaccttccacaaagacagactcaaaaatggctcccaaatggtatgtatgtttaggtctgcatgtattccagtctctaaccaaatctatatgtagtattgtcattggcagcttaaacggtcagatacggcctttgttcagcaagttagccaagctgcagctaaaacaacatttctcctttgcgatcattcttggcgacctcttcggtgatgggtcaactgaagacgagctcactgatattaccgcattgctacaagggaacattactgtggcgtgcccaacctacttcacgcttggtaaccgaccacttccccctcaggtggtcgaaaagattgaagcaactgatgaagtgtgtcccaatttgttcttcctgggaaagcgaggaaccttgaagacaacagatggtatccgtattgtggccctcggtggaaccataggagaggcagagggtagatccaaacccgagagcaatgctagcggcaagttccaacccacatacagtgaatctgatgctcgtgcactgttcggcattcacaaaaccgacattcttatcaccaaccaatggccgaaggatgtccgtctaggatctaactgcgaggtctctggggataaggagactgtgccatccgaattgcaatgcattgctgatgtctgcgcgactctgaaaccccggtatcacttttctcggtcagacggtgctttcttcgagcgtgaacccttctttcacatgccagcagaggatgaaaatacctaccaactcactcggttcatctcattgcctactttcggctcgacaaaaaatgctatttatgcttttagcttggacccaacagcacctttcccaaccagtatccccacaggctccaccatttgcccttggtcggcggcgcaaagtagacgcaaaatgctcccaagccaaaatgaatcataccagcgctacgccccctccgacagagatagagacccagggcaccagcgccgacacaaagaacgcgcccctccgccaggcccggagaattgtttcttctgtctctcaaatcccaacattgccacccatctcatcacctcaatcggcaatgacagctacatcaccaccgccaaaggacctttgcccacaaccgacttcttcccttccctgggcttcccaggccatatgctcatcatcccctttgaacactgcccgaccatcgacctaatcttcgacccggccacccgagcttcgacatttgccgagatgcaacggtaccgcgaatccctgcaccaaatgctgaacgagcgttcaggaggcaagctgggtgctgtcacatgggaagtcagccgctcaaacggcatccacacacattggcaattcctgccgatgcccgtggagaagatccgctcacgccttgtggaaatggcattcaagaaggaagcctcgaacctagaatattcgacgttcaagaccgtgccaaaccccgatgaaatgcacaatcatcatatgatcgattatttccgagtcttcatttggacgcctgcgctcagcagtgaagccgaagccgaagccgataattggtcttcacctgagcacaaaggcgtttggaagactgaatctggagaagagaatgttattattatgaaaatcctgccagagacccggtttgatttgcaattcggtcgtcgggtcatgggcaaggtactctatttagatgaccgtattaactggagggattgtgtgcagaccgacgacgaggagacgaaagacgcggaggctttcaaggaggctttcaagaaacatgatttcgcgatggaggttgaggagtgaatgtgagatcagcaagtttcttctttattttccaggttcatatatgataaatgtgtggtatggtgatcaaggggtctttccagggggcgcgtcttcggaaagctcccttttcgtgtatagtacgatgaaatgtgacatgagttcaaaattgaagccaaaattcaagtttcacagatttttgcagattccacgcggaccacatataaggaatactcatattaatgcgttttcctatgctgtttcaagcactgagattctagcgatgcgaaactgctagactatgcccggatgctcgagatgctaaccttggaagatacctgcgcttttaaaaagcctaacgcttaatcaactgctttatcgtcaattactttagcaactacttaagcaaccaattaagcaaccgctgtagtaactgctttagtggttaattaaagaggatcgtcgtttcaagtctggtgaatgtgataggccgaaaggcgggggaaactatggggatgtgtcccttgttgaccctgtcagacctcatctcttggtgtttcagctatttccctcttctctccttcgtcgaggctcttcttccggccatttggcagtttcaatcatttccagagtctgcaactcatcgtttagtctttttttggatcctctagggtctcacacactctctctagtctttcttcgtcaatgtctcaatgttctattttggtaacttgctgcctgttcgatccaccctcttgaactagcatctattcactccatattcgctcatattgaatctattgtgtgacttcgcatctacttctacactcggacgcgccccgcctcttgatacctccgaccccgacacgcttgtacatctcattcgcgctacagttcacactagactacgtctagttttgaatacattggctgttcgcagccattggaaatcggatgattcccttatcgcattgcgcacccgctattcatttacaagatgagtccggcaaatattacactatgggctcgagataccgcgagtgatctcgcggcggttccaagcaccttctccagctgggacaaatgtatgaccaaatcgtactgcaagtgagttccctcgagggatatgctacctttgcgcatggtctgcattctgcatgatactaattaattggcgcaggtggcccgtcatcgttggtataatcgtcggttcgataattttactctccgtattagcttgcatcttcaattgtctctgttgcggctatcaaggttgcaagtgctgctgtagctgttgttgtccgtcaggcaggcgcaggaacaaaacgcctaaagactttgatgaccctcctttccaccagcaccagcctccgccagcaccaactccagtctatcaagcaccaccagccccgccctcatatcgtggtgcgcaacagactgcacatttcgacgcgcccaagtctccggccgcccatgttaatgaggacgccctgcctgaaatgcctacctgggctggtgccgttgacaagcatgttgaagattcgaatcattacgacgacgtcgaaatggagcctttgaatccgccgaacaggaatcagggtgccggtacacctggtgccgtttactctgaccattcacccaacccacccatgggtgcagccgcggccggatacagaggatttgggcctactgatccgcgtgtacgccggtcccccggcccacgagcagccttgaatcccgtccaagatccgtacgggcggcgctcgcccggtatatcaccatcagccccagcagctggctatggtgccgcggcctatgacccctacggttctcgctctccgacatcgcctgttgaagcaccagtccacaatccttacggccagcaacaataccaagattcctacgctatccactcctatggcgcaggaaatggctaccacgccgtaaccgccccctcgcccgtggctgcatacaggccgcacacgaactacagccccgtgccaatggccttctccccatcctcggagatagaccacgcggccgcgggcccaacatcaggcttccagcgccagccatcctttggctctagccagtatcccccaacatatacctcccagcctccataccgcggcttctcccccggtgcatcttctacgccccctcctgctttctcggctccttcaccttcagagtacactacctataacccccacgccaacaccatccccattcccgagcccgacaacaccagacctccgagtctgttgcagagcggtagaaagcctaccgtcaatgcttatggcaacttttgagtatgacccttgtcgatcgaggcggtttcatgaccagaacgttttttttttgttttctcttctaccttttttcgtttgataccattctgaggctttatttgtcttcgttcatcttttatacttacatgccatgaccttgggccaaatttgggcctagaattaaagatatttcctttctttcatcacttctcccacttgtactcttttgcatccacgggtcggctttgactcgttcgacgggtggcgggttttttgaaaaacaatgcgcatttttgcccagcagcatatgtcccccatgtgattcctcttgattgcggagcgaagcgaagcaattaaatcataacctcgtgtgtatgtcacgtgaccgttcttttctcctccaaaatcattagttagaatcaatgcagtgaagaagtgatgggctaactttggcagaataatccaaccggcagaatatatagactggcctaatctggctagacgataatttctattacgtgctgtaggctagttactcaagcggttactagagtggttagttacacgagttgaatgtttacgaaggacttgaagttatttgaatatttttttcattctcacaaaagaaaatcaaacatttgtgaactggttgtctcctccgattaccctttccagaccattaaaatctcacaaggaaacatatccagagagaaaaggcctgtaatacacaagcaattctcgttatgtacagctgtaagagtcgcactcgatgcaaagattacatcctcaagatcctcctcactaccccaatgacacggttcaaagggggatattatcgggacaatgcatgaaaatacaaatgctcctgaagaattcagccagtcaagggactggcgttgagcatcgagatgcaaatttggacagcgtggaatgatccacagaagaaagtgtgtacatagaaggaccaaatagtggattaaagggcgataatggtgtcaaaagaatgtccggagagaaaaggagatgccaaagtgtcggcagaatgttcgatgggaatcgtccttgggggtattgtcttcatgagacccatggaggtatgagaaaatggaaatcaggtgatggtaggccgggggcgtcttcgtgcgcattttcgggtttgaaagttgcggtgtcgtaagtagacatatgaaatgggactcagattcaaatgaggtcataggagtcaataacccagtatgatcctgggttgtgggcatagagagatgtggcgagaggccacgcaaggaaaatattgaagcaagaacccatgagttaaagagggtcagccaaggagaggacgataccaaaatgaggtatcaaagagatgaggaaaaaggtgaacagcgcggggtatgcagcatgccaacacgaatcagacgtcagcagaactgaggtggtcgagagaagagaagttgagggtaaaaaaaaaaaaagaaaagaaaaagccagcataaagcatcttggtatgcatcagccaaacaccacgctccaagtacaagacgacaaaaaaaaaaaaacaaagaaaagacataagacgcaagaaaatgcaaatcaccaagaaggaaaggtgagtcccttagtaggaaagcatgcgacggccaggggtccgaacaggcactgggctttgagaaaagggagagcttgggtagcggtttcgatcctcgccaagtcggcaacgtccggttgggctgtcctccatctggggtgattgttcaccaaaggcaaaagtctgggcgcggttcagcttggagcgctgcttgaccttgccaagtccacgctcgcaggcaaattcgtgctccttggcgctcatctcgacatagttctgagggaagcagaaagagcgatgttcagcgaagaacgagctgtatccaccatccagaatgtacatatcaggatatgacaggttagggtaagtatcaacattgatagcgcggtcgtggtgacgcaggtacttggccatgatgggagcccggtgggcagagtactcgcagtgcaagacaagcgcagtgcgagcctggggggcattgaagagttcacctgcgaggcgttccttgtcgttatagttcaatgcaccattgatatggccaccctcatactcatactcgaagcggcagtcaatgatgagaatgttatcgaaatgctcattgaattttccattcatgagttccagaagagtgctcttgtcgatgcgaggcagagagtccgcgcgatcctcagggatgaagtgaggcagcttcatgctgggcggactcgaaatgtcactgatggactggacgggtgtatttgtcgctaccttggcctctttatcggcaataacatctgctgggttctcaaacatgctcaatgatcgtcggcattgcttgcgaggacgcatcatcgagtgagcgggtttgcgaattgaacagggaacgggcgagccgctgctacgggcatgctggagggatggccgcatacggggcggcgccaggtgagtggaagaattgttgcgcgagattgaacgctcatgggggggcgaatccccaaacatatcttccagggaagtggacgtgctcagagtggtcttggccccggttccaaatcggaaggggggtgctttgctctctggtgccggccgggtcaatccaagctggaaagactgagccttgcttctagccagactcggacgcaggaagttaggtcgctttctgctgccaaataagaatccacattagcaaaactgtagttggtggctgaataacacgtgaacttactcagttgggcataaaggcgactccatgggcgactcttgaagagggcttggtagcggagacaccatgggtgattccataggactgcccccgggtgtcggcgactggatctcgatctctgctgtgacaaaaaatgcgggcttgtgaggcagaggcgacatatccatcaggtccatagccggagctggtgaagaagatgggagcggcggggtggtcatcacatcatctataaagtatcagtcaaacagtcgctaccccaccctgccattctcggcactgcttacctcgtccattgacctgaccaagcatactggccgtgaacaaagaccggcgtggtgtggccaactgaggactaaatatagagttagccgggctttgtccctttgaacctcatggaaggaccatggaccagctccacatacctctgatcaatgtggaaattctgagacaggtccgccgccagactggcagttggggatgatcctcgaatgggtttcaggttgaagtagtccgaagtagacttcttcatagacaattccttgaaattgaacgggttcccaccgaatccagacattgagcccaggggataagtggaggcctctgaacgaaagcaatggccaaacatgaccgacggaggctgcatcgcagcgagaggtgaagagtgttccatggccggtgacaaatcggacctggagccaaaagccgacgtagtacagtttctggcaaagcaaccggaacggattggaacaatggcaaatcaggccctgcgcaagatgtctaccccgtactaggtcctacaaactgaggttcaaagaaaaaattgtctcaatgcacgtctccacgtttgcaatttcaacgttatgggtccccacgatcgccgtgacaaccagtccgggaaaaaaaattcctaggtcccagaccctcaccaccaacggccagagttgtgctgtgttcaagacaactagatttagcgggccatggcaagatgtcgacgaggtaggtgaatatggattccagagggcgactatgtcggacgtgattggaggggtcgggggggtagctcgtgggtgctgcaggagggggaaagggttccaagaatatgatatggcttgtcggacgggaacaacaaaattgaatctcacgatgccgagtgaggaatgtcgcgagtagttaagaagaagaagagaaagtaggaacaaagacgatttgaagaaagaagccgtgaagctgaagggatgggcttgttgcaatgggcaacgcaggtggggaggatctccgaatgtacagagtattgagtaatactgcggctccgatattcatgtaatgaatattttaatattaaaaaagggtatactagaggtattgggggtaatcgacgtaatctgggagtaatcgaggtatgtatgggggtggaaaccgctagttccagagtacggaaaaagcccaaaaaagaattaaaatcagactaggacgaaagggaagtcaagaataaacctattaattgactaaaagagactggggaagactaagatcggtatgcaaaggcgagtaaccggagacagtaaaagatagacagtccccatgctctggctaggggccaaatactttttttcgtcgttgcccggggctcccttgccgcagcaacccagcgcctatcacagctcgtcgggttgctggtatagacgatgatgtctcgggtttagctttgtctcccctgctctatggaaggaggatttgtcttgctattacggagtagttatacggagtattacacggagtactattactatgtatgaccagggctacatataactagggctatatgtatgtagttctctcgtcccttcttacgttaaataactatccagtatccaccaaaaaacttttttttctctcccgtgtgtgtccgtcaccgtatgaaccacagttcagctgagaaaaaaaaaacggagccaaagagatcgagtctaatgcagaaaaatatccactttcctattctcgggagaaaatttaaagcttctgcaagtgatgggaagcaagtgatgaaggaagtaagggcgcgactacggagtacatacaattgaacggcttcttttttattgcgttgcactttaacctcacgatatgcttcgaaatccaaaatgctgagaaatgtggtctggaaattagctccattcacaattatagtgcaatatagtgctcgattgactcaactagtgcgataagaagccctcttacccgaggtattgattggcccataccggagcgtgtaaatcttaaagatctcgtcttcgcaatgtgaaaagagttgatcctatctcagccctattaggggatatcaagagccgatctgagctggaatctgtctcctgtacgtcgtacggggtatgtacaatgcggcatcttgcacgggagtgtcaattgccgttgaattgtcgaattgcttcgagatcggagcgtccaacgtagtatcgtgtaaggaatggtagataatctcattctcctctggaaagcgaagacgccatacccgtgctgcccttacttgtaccggcattcttgttgatcaagggttcacgatggcttccaatgtcgcgcatcccttccatcccccttggtaggatgtttgacttcaatatacattaattgcctaagggtagttcgattggagtcccgctgaatggcattcaccgcgctttttgcaacttgacaatgaatgcgattgtatctgtattgccctcgctccggaattagggctaatactcgcatcaaggacaagccgggatcacgatttatgcgattgacacaacaaaccaccggtgaagaacctggtacggtcaacaaccttaaacaagtttatcagtatagatctcctccatcggtcctattcaggctatcagatgcgatatttacaaggtatactccgcactcaatctctcaattcgccaccatccacaggcttatactttgaacaaagtctgcggagtgtgttctacggggtgtgaaactgctaatcggctatagtcgtcaggtcatggtggacactcggctgatgatttcattactttattctggtattctagaccctctcgtgaaacaccggaacctcgggcttccctgttcatggtatgtcccgtcaatccgagatgcatcaacccccaatccgttgaatattaacaattggctgtcctcgctgttatatagcacttggtgcaggcatcttacacaaatccccctgtggcagacgatgcggtgtgctccccgacgctgttcggaagattgtattgcccaggtggcccgtgatactacgtcatatcgactgcacatctatctatttgcgtcccgtgcacagcttgcaaacctgatatcctaatttaagcttggaagtcgaggactaagccgatcttgaaaccttgggaagtgtctcgggtcgcgtcgacgcttgtttgggggtgttttggtctactccgtattgaccacaacactggaatatgcacgaattagcaagcatccactttccaggcgcttacagatgcaagactctcataacatgctagccatgtcagcccaagtgccccgatctgagtatgtatctgcgccacgcctgcagtcatagctaaggtggggtcggagaggaccgcccgatgatgtgaccggtcaattgcatcacaacgccatgtgcgatggagccagtcatgtcagttctccagccgactgactttcgctgctgcggggtccgtcacatctcacctcgtgtcctgctaaacataacctgcatggagagatggatagggttgtctagacctttttcccctccttgtccaagaatactccccctcttcccgaccaatgtgatgtcacgatcgtgttgattgttgatagcgcgtgcagatgaaggtaaacaaagcaaaccagattccaagctaatgcgatatcccgtgatcgcacatgacatcaaagggaaacttgcccagatcaggatttccgacctctctcaactgggattcgatgtgtattttggtatattatacctctagtaagacatacagagtactggaaatacacttaccctacatttcccctgggcttttctatatttgttaattattattctcccgtcccggggaccccgatctgcgccgctattggtatcctttatccgcctcatcggcttcgtgcctgtcagctcccctctctcaaatcgtgctatcacttttctagtgacgccctactccctattgggctcgtatcacatagctccgatcgtggctgtctctgtggaatgcacccgcccaacgtgatagatcgagaggcctagacgccgctggactggtatattcgacagccataagttggattgtactggtttagactttgtctcgtggcatcgaatagcctcttttggtcaattattatgctcttttatgctcttaatactgcatccagacctcaagctaaaccccgtagccacccccgtctttacttaaaccccgtgtacactccccaatatcccaggactccgccagattccactctgaacctccgaacaacctcccaagtcacacagacccaaataatagggtcccggttgcatcaggcaacccccctgaacgcgcaaaatctgacacccgactctacatctatcacaccggttgccagggactcccaggcccaccacgacgtcggactccgtacaccatcaccccgagacccatccgcctacatcaaaaccacctgcgtgattcccacgaaatgaattccacatgttaccaagcacgactaactaacctaattctaaaaaaactacttgaaccatgcagatccacggtagacgatcgctcatccgttccaacacatcgattctgatacagaggtaattttctcccgactccttaatatggattctctcagatgtcgaatggtcccgcccaagccaaattgatagctcgatgcacggttcctggtttcactctctctctatcgcccgacagcccaggaatgttgctctgtccggtcatactcgtatacagatcagcccgggcgggtcggtgcatccgcgaaggcagcaccaagcggagcccggatagtgaagctcggatctagcgcaattagcgggttttcctcggcgacatgcgattgtataaatggatgctgatttcccggttgcctttgacaacaggatagctttgcgtctggactggtgtggtttgaggttgatagcccggctagcacttgggtgatctcgtttttgggacgtcattacccctgaatcagtctggacttctttttgatcccggttgccctgacagcttcgaatacaccgtgttattttatctactgaaacgttggttgcatgttcccatgtccgatctgttgtgtggtatttgaggtatctttgatgcggcttccaggggctacattggagaggtacggaccactccggcttacttggagattgtcttgagggtttgggggctagattgtcttggcttggatcgtaagctgggtagcgtttgactttgtggtttggatctgcctccagaatgctgtcagcaaatattgcttgttggaggccttggagtcttactgagaatagtcacatgctctaatatatatgtgcctggaccttccatatagcttcgcaccacacttggtttcctaacgcggccaacaaatcatgagctccagaaatcctcccgaagattctagaaaatatccacattgaatgaggtcgattgcccgttcaaccccaggctctttggagcatcgaaattcttatcggcttatcggtctaggctagtcctaaataggctaaagcatgaatttttctgagcgacttgaacggccgcaaggagtgttcaacgtgcctttggtttgcagatcttcattatccaaggcctgagagcggataatccaattgttaattcaacctcgcatctatccgctatccccaaaccccccagactcagcaatgggcccccccttcgccggttcaaagaagcgccgccgtgaacctcacaatgtcgacgtgaagctggtggaactctacgaggatctcgctagcgaaaaagatgatatccgactcaaggctgctcaagccctagtgtcgcaattcactccggaccagaaccctgccgatgaacagatcaagaaggtgctgtcgagactcttccgcggtctctgcagtagccgcaaagctgctcgaatcggattctccattgccttgacagagattctgagtcaggtattctcgtcgccgagggagacatcacgctttggcttctcggatgctctgaacctttgggagtctcagtcgagttcctacggcagcgagtcgggacaggttagtggacacacatgagttaaaacgtcgcatgcgctaactaggattcgttccatataggagcaacgcgatcaccttttcggtcgtcttttcggcgctgaagcgatcataaaatcctccgttctgttccagcccaccgtgcccttcgagcaatggactcaggtcgtcgatttggttttcgaactcgcacaaaagaagccatggattcgcgaagagtgtgggtggattatctaccagtgtgtctacgacctggccgcgcgcaagatggaacccaagtacgtccagtctgcgctggaacagctctgcttgcgcgacctcgcccggtcgcccgagggtgttgctatctggttggcggcgaaggatctgttccccgatgctactttcccgagcaagatctggaagcatgacgatcccctggatacgaaggagcgcagcagcatgtcgaagatcatgaaggaatcgggtgctgcgcccagcgagggcgagaccaaggtgaacactgcgaagtcctctggcgtctggaataacaagcttcacttcgcctgggatgcggttctctctcggaccagtgttgaggcgaaggataagtcgaagaagtctcgtatgaccttcgctgatttttggacagaggttgtggacagtgagtacctatctagcggtggaattctgctcaaggcacatggaactgacaaaaagtctctttacagatggattgttcgctgctgcgtcctcggacgagcgtaaatactggggcttccttcttttcaacagaattctcaacgatggcgggtcgcagcaggcctctcagattttcaccaagaaccttatgcgatgcttaacgaaccagcttgctgtggaggaccggtacttacaccgaatggccgctaaggtggccaaggcaatccaggcccgtgtgtccaaagagcctgaattcgcagctgcggccatccgtggattgatgggaaccagcggcaccctgaacttcgaccaggctacaaagaccaagactgtggaaaagattgttgccgaagccaaccacgaggcattggaagagattgtcccgttcttcgaacaacttattcaaaatcccggcaccaccgaggagaaaaccgccgcatccaaccgtcaattcgtcgctggtctccttttgtcaattgttcgctccaaggcttctgccgacgaagacgatgccgaagacctccaagcaagccttgagcagatcctgtctatattcgtgcgctttgcgtactttatggatgccggcaagggatccactgcccctgagcctcctctgtcatcggcgacacaagaactcctgcgcaatcgaatcaactcctgcttgaacagccttatttccaaccaaaagttcgccgctaccctcccgtatgctgtggtgaagcagattcgcgatgcagccaagtctggcgaattcggcaagttcatcatcgccatcgatgagaagctgtcggaatctgtgaaggctgctttcaaatctctaaagaagttgtccagcagggtatgatttctccccttatcagcttttagctacttgtactgaccatcacataggagaagaaggagaagggcatggccgcattcaagctgctttactctatgactatcatgcaggtgtacaacggagacgcagacgctgtatccatgcttgatgagctggagttctgttataccaagttcttgggcgacaaggaaactaagacagaagacgccggcgatgcctcggatgcgttagttgagatccttctcagtttcgcatccaagcaatcgcagctgttccgtcgtatgagtgagcaggtgtttggcgcattcgctaaccagatcaccgagaacggattggaatctttgacctcggtatgtcgcctcaatttctatgagatatgcattttctaactagacctagattctggaggccaaggagagtctcgctggacagcaagagatgtttgaagagcaagacgatgaaggcgtggaggaaggagaagatgacgaggatgagatggatatcgacgaggatgagctcgacagcgatgtcgaggttgtcgaagccggcggctccggctccgacgatgacgatgacgatgacgacgaggaagaagaagacaacgaagaagatgcaaaggaagtcgccgccttcgaagccaaattagccgcagctctcggcacacaccgcgcagacgaagacgagtccgattccgacgccgacatgaacgacgacgagatggacgagctagacgaaaaactggtgcaagtattccgcgcgcgtcgtcaagaaacatcccaccgcaaagacaagaaagatgcacgtgagaacatggtgaacttcaagaaccgcgtcctggacctactagagatcttcgtgaagaagagccacacccgcccgctcgcgctagatgtcctcctgccgttgctccgactatctcgccggaccaacgtgaagcagatcgccaccaaggccaacggagtgctgcgcgagtacacaaaggtgtgcaagggcaattcgctcccgaagatcgaggacgaggcacaggccgaggcgctctgggagctgcttcggtctgttcataatgaggctagccacagtggccctatgggccatgcgactgcttgcagccaggctagtttgcttgttactaaagtgcttgttgcacatgataaggatgctattgcccgtgttgtggatgtttatgctgccactcgcaaggatcaactcatgagcactaagtgtcatgtgcagccgtcgttcttttcggagtggaataactggtgtgtttctgcgagcaagcagttgaagtgatgatgggttgttttatatagagattgcgagttatgatctgtcgctggacttcatgtcaatattattatcaggttcattcaacctgtctatatagtccacctctctctctaccttcctttaaaccctcctcctgtaaacgacgaagctaagtcccggcggtgagaagataacgttgatatatatcactgaaggtcatactgcgcgggtatagggataattatgaaatagtgagggtagtagatagaatatatataataggcctcgcggttccaaagcgagcctatatgaattattagtttataatgcattatcctgcagctgtatgttatcctcatcacaacgaattatagaaaactcccctaaaagccagtaatatatcgatgctcattcgtctcttccaaaacctccaacctcatcccaacctcaatagccccctcattacgcggcgcactcaacataccaaaacaaggcttatacctaatcccctcatccaccctacggtacgaaacaagtgtatcccacggctccttcttattcttgagcgccgtatctggatcaacattaggcacctggcagcgcgcacagcgagccacaatatccaggtcaagcggagactgaataacagcctctccgctaccagcggaaccaataaaagtaccgctagcatttcgaccagtaatgcgaaccaacttccacgaatcctcactccacggcgccccgccgcgaacaacgatattcggacggaaccgctcgacagtaatcgggtcgacgcccacccttaccagacgaacattgagctctgccagcgaagcctccgacgcaatcaacaccggatgcacgtccgcaaagccggttgtttggacgcggcctaggtagcggggggcgccgttacccttcagcacgcgcggagccgggcccttgtagacgagagcgacgtcgcggcgcaggaaagcagagaagggagcgttgatttccttgttgtacctgtacccgtctgtctctgtgtcccagatgtggacggggcccgtatttgtatttgccgctagccattgcggtgatggatgggaagggatgcggatggtatgaaaatgatggtcttggccttggtattggctgggtttgttgatttcgggtttcggtatactcacgaccaactcgtcgccgtcggcacttatcgcggtgcgaatgcgggtcatgtcggggatttggcggatggttagaaacgtatttgaggatgcgtcaatgagcatccagcggcggtcaaggtcaagaccatgctgtttaaggaccgttgattggacttctaggcctctacaggattttatggggtacatgcgcagcgagacgatttcgctggattgtttggggcgctggcgccataggcggagaagtttggtaggggattggactgatttgggccatcctttgaagcgcggaatcaggatgattggaattaggagcagaaggcctaatatcactgctgacaccatgttgtgcgactgaagcatgctatttgggaagggtatacaattacaggccaccgaggtgagaagtcggttttgccaaggggggccgccttatgatgtacggcatattcaggccacagagagatatgtggtactttcagtttgctgtcatactgttctgtcgatatgttgtgccttatcgattattgtatatggtatttgctttaggtccaataatagaactcggaagtatgaattagacaaaaggtaagtacttgagacatgccacatatgaacaccacgtataaatgcaataaatgagagggaaagaaaccggaaatgcacgtataagtccaggagaagcaactgctgaagcgaaccagatattacagggggcaaaaagaacaacatgtacctaggtcgacctcattaaggggtatatgcccaagacacagctgactgcgatgccgcaatctcgttatgccgaacccttcttatcaaaccaacacgcgaccattgccttaattaaggcgagtgcgacaacccggccctgctcaatattcgcatcctcagacgccccagggacatggaggaataggacattgcggtcctggccttgtaattgggccaaagacatgctggtatagaagatgaagtcgcacaagtagtgacccgcgtcattggaaatccgaagatccgaatcgggagcaaacgagcgccacgtctccaggaactggtcatcgggctgataaggtgaagcagaggaggggtcatctgtagcacgacctggggtcagaatcggtggcagacccaaacctttccattgtttttcgccgtccacatagccggggcgaccgtcgacatctgtgatgttatagtcatctcggtgagctagaatttcgacggagtaatattgccgcggagctgcgatgccgatatgaataatgagatcaggtctgcaaccaccatgagaggcagcaaactcctccagaatcaagggaagagtctctcgaacggtggcatatgccactgggatcggagtgggatgcacatggagtgagactcgacgcgggcctgagtcttggtctttgggtgacggaaaaaggaaagatgatggaagagaggaggcgaccagatatgatgcatttacaaggttggtcttgaagggctggttacactgttagtttcggattaccagcatccgaagtgcagatcacttaccccaaagcctgttatcaggacggatatctcattaaccgaagccgagggccgtggcgggctgttatcgacaggagtggaggatatatatggggcagcagtaccgtagtcacccatgatcacggttattctcgaggtgaagttgagaagaagatgacttttgtgcggggaagttaaaccttggatggccagacgaatgcgggggtcttggcgggatgcaacccatggattctactaacctaattctgttaagctatatataagtgcccaggtggcggccagttagggcttcatgttttaggcttattatgttgtatgttgtaggttggctagtttaccttttcaacaaaaagtaacaaaaagaaaatctcggatgggttaccgagacttcttctccttgtaccacggagtacagagctggtttctcctctaactattccaccgtttaactcgcagaatttgcaggcttctatcattggcacgcttatagattgaaaaccatctgcatatgcaagtggatccaggcggaatagaaaccccggtcaagaattgcctgttcgggtaaggatcgcttaatttggctctcgttctcgcattccaggttaggtttggagtatacccatcaatgtgagctaagaatatgactccggagctttgacatttgggtgaaaggagttggtcagcttagattttattggacctgtagatttccaatgttgcttggctttggctcggttcggttcagcttgacaacttgatacctacgtgggtcccccctggttcgaatatccagtccaagatcgggttgggaggaaaacggagtctcccttactggcggatggctcgggaactattataaatgagaaggtcctcggagaatatcagtttctagaaatctggggtgtcgcttctattgctgtccccttccccccttttcagtcttgaccttgactatggcagtcatcactgaattgctcaacagtccctatgtcgtacagagtgtatgcattgccctagtggcggtgtttataacgagcttttgggcagatatagcaaacgagattccccatagacacattcctctagttggaaaaacctggtgggagcttaccaacaaaaaggcccggcaacgctttactcggtcatctcgccaactaattaccgaaggatttgccaaggtgagtcctaagagaaatagatgacagcattatctactctcaaatatgttaataggcctttgcagggagcaaatgtctttcagatcatcggagccacaaacccgatagttgtattgcatccgaagtttgtcgatgaaatcaagaaccacccagatctcagttttgaagactccatcaaaaaggcaggttatgaaaccggaaataatccctgaccttggctaacttgtgaatagacattttttgataatcgcattcctgggtttgaaccatttcataatggcacctctttgaaagctaccgtggagattgtgcggaccagtttgacccaggcgctcggtatgcatgtttgcatctatctcacccgagagacatgattgacttatttaaacagggtccatctcacttcggctctcaaaagagacaggcgcgatattgaaggaatccttgcccgccaccgatggtatgccgacgcaccccatttgcaaccctcttactgacgcttcctctcttggtagaatggaagccctactacctcgcgcataagattccgtacatggtagctcgcctctcctctctgatatttgtcggagaaaccatctctcacgatgatgagtggatcgatgtttccgttaactatgccattgatgcgtttatggctatgcgcgatctacgagaatggccatctattctccatccggtcgtacactggttcttgccctctacccgaaagctacgcacgcacttgggaatggctcgctccattataaaccgcgagatagacaggcgggcattgattcgcgcgggcaagctcccagcagacgatccacctcgtgggcctgatgctctggactggtttcgcgagaccgccgaaatccgtaataacttgacctttgaccagtcttgtgcgcaggttggattggcgctggcggccattcataccacatctaacttgttaactaacgtcatgtatgacctcgcggcgtacccggagtatatccagccgctgcgtgatgagattttagcggttgctgccgaagatggagttctgaagaagacgagtttgctcaagttgaagttgatggacagtgtgatgaaggaatcgcagcgtactaatccactctcattgagtaagtcatccaggttctttcgatcctctttcgatttaaacctcttattgacaccccaatagcttccatgaatcgcctcgccctcaagcaaattgtgctctccgatggaactgtgattcctaaaggtgccaacatgttcgtctctacgaaaaccctggaagatgacaacatctaccctaatgctggcacttatgatggttaccggttttacaacaaacgccagcagcccggcaacgaacacaagcatcagtttgtcgcgacgacaagtgagcacttcgtcttcggccatggtgttcacgcctgccctggtcgattctttgctgccaatgaaaccaagattatgttccttcatttgctcctgaagtacgattggaaactgcagagcggcggtcgacctccgaacattgagaatggtgtcgaatctatcaccgacccacgagttcagattttgtttcggtcgcgtgagtcggaggttgacctaagtttcctaggagagtgagtattgggtggatgtaagcagcgcattgttttccctttttgttctatacatattggatatcgctaggttttctgatttaatcaccatggaaatgatgttacttataagcggtgggacaagctagattatcgaatgtccaatgtccccatttgaatattatcgagtcatttgaaaaaggtcaagtccaagtcttcgaggtgaccaggcaagactcggctcctcgaaagtggagatgattggcatctggcccacagttctgcgggtattgtggctatccattgtaagcgagatgagatcttgttactaaattgggaatggatctctgaatcggagaatttaggaacattcacagatctcaatgaatgctcaacggggcataaatcacacatatacgccgtggcagtgatatcaaggaagtcgagggtctcgtttagggttcaaatatcgacagaaataccacgtgacaggtaagtatacagtatatatacggtaattttcaacaacgtgtgttggacgcgtcgcgcgtcagtggggaaggctgaacgtgaagcttctccaaccgcagcgcctccaccaactctccccccaatagggttatatgggtcttttggcttgtctctttcgttgggtcgctcgggctccagggccccagaccgcacaatgagaaattgtgaccgctgatctacggtacccaggtacccgtaccaagatggttcggcttttctttgaaggcgacaaaccaattcactctgaaaggagacaaaagagaaaggattcttacttttcaaggcccgagcgactctaagcatgattggaagtcaaaaaagaaagaaaaatgagctgaaaggtatcagtgcagacgaccatcagctgcacttctatacgcaggctggccgttctccgttctgtttggtacgacatgcaacatacaagcccttgcagctatggtgtgaacggctggagacgatgtcttggatatggagcaacgatctaccatacggagtactcggcactgatctcaaacaccagccccttcatttatgaggtctacaacgtacagagtacagcatacagctgacaggctatacattgtacctttgcaatggaaaagagcaaacagcggtcattcgctaggtgtccttacctcccaagatggttgtcaaagcccggccaaattattcgacggtgcatgcatcaagcaaggccctgatatgcccaccgttctatataggaaagactcgagaaaatctaaacaaagcatagagaacagaattagacttgcagactaaaaagaatttcgaacaacgcataggattttcgcagtgggccgttgaacaagtgcacaagtacagggtaccacgtccagtaggctgtccaccacggggagcgcaggtaccaagtaccccccactgccgcacgcctcaccctacgcccaatcccccatcctcttcctcttcctccttctctccctccctctcttcctctctctctttaccaaccctttccaccattatcgcgagatcttttctcgcacgcttcttcgtttgcggagacgttcttttcttttgtgtgttattttttttcgggtaatgacgaaatccttcattccctactactcggacgggatggagccgcagatgtgatctggtgatccccgatttcaagttgccgcattcctcaggaagcacacgcacaccgagacctcggtttttttttttacttttactttcgcattactcctgtatctcttgctctcgttgcattttttcctttttttctccccttcacgattcacgacattgacgcgacgctgcgcgcttcgagtcgaagccgcgccgtactcatctactctcaactcccccaacacgccctcgaattcttcccagaagtcgcattgacccactgcgattcgcaagatcgcgacatcgccatcatgcctcaacgtcaactttcgcgcactctgccgaagaactttaccttctccctcggcgatgaacccaggactcccgagcgccctcataccgcaatgaatgtgcctccaccacctcgtcactcaatctccaatggccgcctgcccagggttcgggctcgcgctggtaccaacgtttgcgctcgcatggacatggatatgttccacttccacggctccgatgttcccctgccttcaattgaagtccctcaatcgactactaacttcgaagcgccttcattccgtggtttcgcccacgacgagggatatctcgcgccccctcgcgcgcgaatggattttaagacgccacctgcacagatccgcggcacgccttttgattcccacgacactggaaacccgtggccttcgtgggaccacactcctggcccaaacaactttaagcgcccagattcggcctgctcgagtgtgtctaattcgtcaatcgaatccattgaaacgttcgcatcacgaccgtctgtaggaagtttcaccagtgtcgagagcgatctgtttgactcgtacttccctttggagatgtccaaagaacctgagattgagtcgccttcgcgacctcagaagcagtcggcgcatgtcaaagcgtccaagaagtcctggactcgcgatatggatacccacttatggaatacctatcaaatctaccttcaggatcctactatgactccatttaagatgacacctggcagtatcccccctctgggagttacctcgcgtgttgcgcgacgcgccaagaagacatggggacagaagagcagtcgcattactgaatctgtctcgatgcggtctgttgatcccgatgaaatttctacacccaaggccatggacggagagttggaacgagcttggcccaagtctgactctaagactcgacgacgcctcaagatgctatgtcgacgcaaattctcgatttctccccactatcagcgcatcatgcagtctcgcactcccgagcctgtcgccgaaatgttcggccctgccccggatacccgcgtcaaggactttgctgataactcggcctacactactcgtgacctcggcgtttctcttgtcacctcctccgagcccactccactttctcgggttacacaagacttgccgtcaacgacggactggttcaacaaccctgtgtttgctcatgtcgagccaccagtgaccaagactcctagtcagcatcttcgtgtcgaatctgcccctagcatccctcgtcttggatctccattcgtatacagcacttggggccccggtggatcaaaccgccagctccatgaccctagtgctcgacgggagaccatccatgttccgggttatcgtgcccgacgtaacacatacttcgatcaatctttgcccaatcctgatgatgtattcgcaagcgtatccaggcagcagcagaattcttccgatcgggatgttgaacgtcgcttggaggactatgttcgtgacaacaagttccaagacatgggccatggtcgggtccgcgttcgcaatcgtggagctaccactagcgctgtcaatccaagagatatggaccagcttttctctccgccctcgtccctcaactcaggcccaattgagccagaggagactacacctgttttaaaaccccccatgaacccattgttagaccttggcgaaaatatcaaacgccttggctcacccttccgggtcgaaggaggacataagcgtcgcgaagccccgaagcgagtcattagagcacctgcactgtctgatccattctcgagtggtggcccttcatatgtcgggcctcatgacaacacctctccaatgcaggtttctccggctcaagtccgagataaagctccggttcctttgccatacaatgcctcagaggacggcctttctgatgctgagcgaatccgccggcaaatcttgaatatgccttttacgcgcaactaagttgcagcctttttttgctgtcgaatttccaagtatccgtttcatcgtggcgtccatttctttgcgagattttatcccctttgcattatgacttgaacgagataccgacagggccctggtacaacccttgcatttccagcatttttacgacagcaacaccaccatccacgactgtaacgacaagtctgattcacgctcaactccaacgacaaaaaacaccctaaaaaagtgatgggtctttcccttttttcatttgatcacaactcgcacacagtacatcgacatctggctgttggttacctgcctacgaacattgacctcgtttgtcttgtaacaacaccttgtgtgtagttctgtttcgccccttttactcgagaccagcatttctcaatgcagtttcatcattccttcactcacctcatttccttttcttccaacggggctctcacctcgaacaaaataacccaacaccccaaaaaaagttgaaaacaaccgaaaacccatgtctgctgtcaatcagttatcattcgctattttcgcgacccacgttccttacatattctccttatcttcttttctcagaccttgtctagtcgttcatcccctgcatttcctacaaggtacaacatgcatttctcaccatgacatcttggagatgtggtcgacttgataatggtcgccttccgaattacccgtcacacatggcaacgactacctgcatctatgctgacccttgccagtcaacatagatggcaatgcactccctcaaaaaagcgtgcaacgatacatatgcaagtacatagacgaactgaaacgaaacgaacgcgcatgaatattgcagttgaccaacggcatccctgatacgcaagcgaggtgtttggttttcttttgccagcgattcccatttcttcttaatttgcatctcatgatctcaatcttgaagctgatttccccgtgattttacttctcgcttggtgatccacgatttaccaccatgccctcgattctcgatttgatttagctcgcactccatgattccccttgtggcgagccttattgggtttgcatccggataatcgcgtttctttttctccggtctttttcttgcctcttctgcgtctcatggcgtatggatgtctgtctttttttctgctttttcagagcccttttctgcttgatctttgtgatcttcctctggaacttgtgagagtttggccgctttatctattcttctgctgatttatttttcttatgcgagggttgatcttttagagcaatggctttgtttgatcgaactgatccgccaattgaattatcatcttattccattttcatatattctttcggttgtaagtcaccgattgcctggtaactttgtacctgggttcttgagcagatccattcttacaagaagagttaactagctgcacttccagcacggattttcatgtgcgtcttgcaggcaattgccagcgaatagactcccttcattcctctatctcgcgttcaaggtatgctactaattgtctatgctctttcatactcggctttatcagctataggtactaactagataagctctagtttcgtccatttacccttggtttgttatactcgaagtcacagtttagcaaatagtatatgacctgtgaaagtttgaacagaagcgagtagggactcaagatactcggacattcaatggatagcttgccttaatgcaatggggaatcaatatcagatattatctacagatcagacaagcatatgaacaaacaaaagtaaccagaataaggacaacgagcaacaggtaatatgagcggaaatgggggtataagttataaaagatatctgcgatgagcaattcaacacaacaagaagcggaacaaaaaaaaaaaaacaaaacaaacaaaatcacttctccaatttcctcttccgctcagcaagaagaacctcaatcttgcgaatctgaagagcaagacccttcttctcggcattggcaaggagccactcctccatgtcttgacgaatgtgccgcatggaatgcaagacaggcagaataggcacagaggacagaccgtcatcgactccgttctcgcgctcattatgctgccagcgctcggcaccggggttgagcaagagatcgaagacaccggcccagagttcacgatcccagtatcgtttcagagactcgcggatgcgatagttgcggaatgatgggtttccgttgttgccgtcgatagcggtggattcgatgtatttgccgaataacagcacgtggatcacgccagcaataccgtacagatcaatatggtaggtccaggggcgcatctcgcggatttcattgcactcatgcgcaccggtttcccagtccgcgatgaattgcacggctggtgagaatgcttgcatgtcgatgctgcggccgaagtcgatcagtgctaagcccttctgtcgccagccgtgagagccgcttggggagtagtggatgctttcccggggatcgaaatcggttttatcggcgtcaaggtcgagcagggaaagggccttagagggaggttcgttgggattgtggtcatctaggcggacgaggcagttgtcggctttgatgtcaccatggaggacgccgttggcgtggagtgcttcgacggtgcggaatagctcaacggagaagaacattgctaaaacctcctcaagaccgccttcagaagtatggttggagttgatggcttcattgcggacgaggtttacgaggtcgagtatggtaccctgtcctcgatagtcctccactagaaaactttcacgtcggtggacatgcaattcgtgcgcgcgaacaatgctatcggtggcgcgagaatgatcaatggattgtcgtaggcgaatataggctgtgcgaatcatataaaactcccacgcgcttgatggtccattttcgaccttgactgcttcgaaggggaatcggggagtctcataagcgttcgagtttctccgtcgggaaattttgctgctagggcttgtaccatcgtcggagtcagattcgtaggattcaagactgtcaacactttcggcgagatagacaggggcatatgcaccggctcctagctcacgtctgataatgtagcttcgttccgctcctggaaattcgaggataggcgtgtcaaatgcgccatccccaccactctttgatcgcctggtgttggttttgacgaatttctgtatcatcgaagcatagttactatcttcgacgtgaccgtgataacccgtgtaggtcgcaagtggcttttccaaggaattgaggattgtgttgcgaatacccttgtcagtcggattgcactgcacatccctgattatcggttcccgtctccggagcttaggcgcgagggccttgaaggccatgggactgaatggtacatcggctgtagacgcaatagtatgatcttcttcgtatggcgtatctgtccccactagactagaacgaaacaagttaccggccggtgatcgtggcttcgaaggcgttttcgcgttataaatgctgtttcgagcggctgtcaaagaaggaatggattccgttcgctccacgataggtgtcataaagggaaggcgattttgggccataattgcagggtcacggtaggtaccccatggaggagcataatcctcgggcatttctggaatgaatcctttcctctccggtgttccttgtgtcgagctaccttccgctccatcactaacgacagaatgtgaggtgacttcataattttcgatatctgggatatcacggtctgggttgaactccgtccaatcgctttcatcgccatcaacgctctcagctcgtgtggtgttggcatagtcggtgtcatcgtaggatttgtggaatgtttgtgtctcctcgtctccaaagtcgctcgaggccgctgatatgtgccctgtgcatgtactatctccattactagcgcagtcgtcatcttcgtaatcgctaccgcagaagctatctgcgtctgcttcagtctctgccttcaatggttgattgaagatgctatatatctcatccgtcgctgcacgagtgtgcatggtcattgtcggttcccgggtactctttcgccgcacctttttattattggtcggggagtcaaacttcattttcactgcacatatgtgagtttattctgcccaaataatgacaaaccgatagcacttacctgtttgtgtctgtgttgtttcccctttaatcttagtgcgactcgctttgggtttgcctccatggccttcatgttgataatgagaatgaccgtgactagatgtagtaagattctggcctaaatgctccggcaagtcctctggtgaatgagatttccctagcagggactcagtactgcttgcgtttccagagatctgttgcaagggttctttttgttgccgccaattcttgcccatccaaccacgcttgatagccctaagctcttcaaagctcatctcatgtgcagggttggtgcggtcagggtatacggattccaggtcgacaaatacacgttcccgtcggccggttcgggggttaatcgcttcccttacgtgatgttcgggtagttcttttggtggaattggttctttgaaaggaagatctggattggactgaatacataataaaacaccataggttcatgccagcaattagtcctgtgatcgtaaatatgtggaggtctgaagaagcaatgggtaacttggaatgggaactcacctcgtccctgaagatggccatcttttgtgttggcgctgctttcttcccaaccttcagtgtttctcctgtccatggctttggctccacttcgttctccttcttgcggtcccgaatcgatccaatgctatcccatccctttgtcgacccaccagttgcgggaccgggcgcagcagagtcagcgtccgagaaaatagccatcttaggctttccggaattggttttcgcggtaccgcccgtctgaggcgagggccgtgaagcttgtggaccagcaggggcatctgatggcgcgaacgggttcatcttggcggccagcgcgggacggacagtcggcaaagcaggcgacgagggcccggtatcttgttggcgttggtcgtatcggaattgaaactcgctgtacttgcgtgccaatctctcaactggtcgcgcctcacggtccatgccgagcttgtacacttcatcggcttgtgaccaccgaccagcaccctccagccacccggcaaattcctcatagaaaagagccagactttcaccaatttgatgacgtgcaaggaaggcaaatgtttcgcgcggggcatcggagaagagtcgaacataatgaagccataatcgtagataccgagggtcgtttctgtagtgtgatgatgagaggaacgacttcgttgcccgttccaatagggggagaagaccggattcggtggtcgcttgtgcggacggatacgcgttcagagtccatttgacataacggtcataaacatcgagcggatcgtccgattctcctatcgactgcaattcactttcgaattcttggcgcatggcatcattgatggtcctggtgccattcggcgatggcgaggggatcttgtcaccattgctgccggctgaaaatatccgggcgagttctctggctgatcggccaccggggagtgattggacgttttccttttgtgcttcgatgatatcgaaatcgaccaaatcatcagaggctgccatgttagctacgacgacagataatgtgagatcggagagatcccaaattccgtcgaagaccgaaagttcaaaagagcgagtaacaactctggcggggctgcaaggagattgattctgtggctatcgataaacatcacatgactgttacccgggtgacaggtcacgtgtcccagacaacgtctactgtatcggagcagagaatggtcaagttaggctattcaacaagctcgatctattttatgaccacatacttcatctgtattcctgtgcggtatttgtgggtcttcagagtgtgtagggtcccgtcttgatcaacgaggcttggcaacatcaacaacctcttcgggtcttcaatcagggtacccactcagctcaagaggctctacactgtgacactttcagtgctatgtgttgtcaggaatctggatcgccaaggtgcgaagactctgaatctaaggtcagccataaacggaacctcagccatggaacatctgagctctcgccacccagacgatccaaacgacagaaatccactaccaatttgaaagaactttcttctccagaagcctcggagtcagaggccgaagaatttactcctacagttaaaaacgaggttgacaacaaacctctggttgatactgccaaggagaagaaaaagaaggctccagttaagaagtccaacgaagacgccaaacccaaaaaggcgagaaagtctaagaaagaccaagaacttgagaatatgcctctggcaccgcggactaagggtctgcgtatgttcgtcggcgctcatgtcagtgctgcaaaaggtcagtgttctccgcatctcatcgtctcaattcggtaataactcaattcttatcgagcaggtgtctttaattcgatatataataccgaaaatatcgggtaagttcgagtgtcttccaattacatccaatcatgaaatagattctaatcttgcaactagaggaaatgcatttgccttgttcttgaagtcacagcgcaaatgggacaatccagctctcccggacgaccagcgcgatcaattccgtaaactttgcgcagaaaagggatatgatgcaaccaagtgaataagccccatctgattggactcgaatgggtcactaacatctacccagacacgttctgcctcatggttcataccttgtcaatctagcccaaagcgataaagtaaaatccaagcaagcatacacttccttcctggatgatctgcgccggtgcgaggcacttggaattacactttacaacttccagtgagtcaaccgcctgccaatcatatcggcgcatactgacgctctccagccccggaagtaccaatcagacacctctacccgaagcactttcccggttggcagagatgttagtccaagctatcaccgaaacgacaaccgtagttcccgtcctggaaacaatgtgcggtcacggtaacacaattggcggtgcactgtctgaattccgcgacttgctagctctgatcccgaaagagcaccattcccgcatcggcatctgtgtcgacacctgccacagctttgcagccggctacgatttgacatccccagccgggttcaaatccttcctcgccgaattcgacgagctgatcggaatcaagttcctccgagctctgcatctcaatgactcaaaggcaccgcgcggaagcaagcgcgatctgcatgctaatatcggcacgggtttcctcggtctgcgcgcatttcacaatgtcatgaacgagccgcggtttgaagggctacctatggtccttgagacgcctattgaccgtgtcccgggacagaatgtagctactggagacgatgcggctgatgggagtgagagtgagtctgggaaaaagaaactcccaaagaagggtcctaggggacctgctggtgcaggcggagctgctgttcctgatcagggtgtgtgggcgggtgagatcaaactacttgagtcgctgattggtatggacccggagggcgaagagttccgggctcttgaggcccggctttcggaggagggtcgtgcagagcgcgagaaacatcaggagcaatatgagcgtaagctcgaagcggacgagaaaaagaaggcgaagggaccaggaaaggccaagggacagaagagtcttatggacatgatgaagagtggcgctgcgaaggagtagacatatattcttttttgaacgcagagcagaggggtggcaatgcgatgaggaatacttgctgggtgtccctgtgctttctacatcatcccgaggactatataataatgaaggatataatcactacaacactctcagggtttcaaaatacaaaccgccaaaatgtagcccttataatagctgttgaaagtagaagagtcgattcaattgatggtatcagttaagccaaagccaaaatccgcacaagccccttcatgcaaatagaaataggaaattgtgttccggtcaatcaagagttcgaccaattcatatctgcgaaagtagacatagacatgcgattccaagagccactaggttctcctcgagtaggtcacagaccctccaacaacgaagagagtataggtgacataaaaaaaaacaatcacatgcatgtgcaatataggtaaatgaagataggagaggggtagttaagaatgagtgtgaaatgctagtgctgggggacattttgatcccgaattggcgaaacagacgagctcgattgcaggcccggcgacgcttggcgagcaggggcatgcaagtggggaaaccctgcctcggccattgtagtgatagtcgcaggtgctgatttaagagaaggaccatcgttttctagaataatagaagtcgatattgagagaccacgcctggcaccactggaacgtacccgggctgatgatgattggtgatcatcgttaaggtaactacccggtgcagggctaatgatcctggagtccggataggcaatttgacgataatccccgggatcgccagtgctatgctcaccttcgtcggtgtcagatgcaggactggactcgcgactccaatcatcttccgggagctcgttgcgcattcctgaaattttcatgtaattgtacgctgcaatgctgctgatagtgacgaccaaaccggtcacattgacggttgtgagcttatcgtggaagataatgcccgcggcgctgattgtgactacttccttgaagataccgcaaatactgagggtaacaaccgaggagcgctttagaagcgcgaactcggatgaaatcatgcagaatgcaagtactccagggaaaatcagaaggaacgaaccaaataggttcccatgtttgctggcgagcgcgaggtatccttggtaaatctcacgaggaccctcaatagatagcgcgatggtgatgagtgaaaggaacatgataggagtcaggagaaagagagttgagaatggattggaagtagccgggtggcgaagcagcagaatttgtgtcagaccccatcggaagcccgaaaagaacgcggaggcaatgacaagtgcgaagcccagcgcattgaaagctgtctctccagcgaccatcatcacgacacctactgtcatggtggcaatgatgatgattaattttgtcgaaggtgtttcgagacggaaaaggaaggcgaataacaggacgaaggcaagtgcagacgatttgcacatggttaaaaaagtcagagagatgaacttcaaggacatgtttccgagaccaacgtcaagcgacgttgctgcaccgcacggaacgaggcgagtgaagtagaataatctggaaacgaggggttgtggttcctcggggccatcgatgggagatgtagccgcagaccctaccggtcgtcgcggacggagcgatggaaagatccagagtattatagaggagagagagaattggacaaccatgtgtaagctcgttgtgaaaagagggaaagggaagacgacatcattctcggagaacatccatttgttgtactgcaaacatgacagttgttagtttccttcttgacttccaaatatactggaaagaaccactcactattgaaatggacagtgagaagagataccatagcaagatcagcccgccgttgattaacagcttcttgaccacatttctgtccgacagaatctcacgaatagtaccatggctcttgacgtccgcgattctagcatccaacttgcggcgctgctttcgccgtcgacgtcgctggcgtttttgatgtgttgtgagtccggtttcctcgtcatattggtcatcatccgaactcatcgggtccaactccagagtctctgcagcggataagacatcggacgcatcggtatcctcttcggcggtcagaggttcttgttcttcgcgtttgtgacttcccccgtctccatgcgaccagagtgtgtcattgcgctctgtcgaaatcggttgtgaggctcgccctgtcccggtaaccatggagcttcgccgacggtggtgggcgccgtcggagagccccattttaatgactgggacagttacgaggtataaaatgaaagagaggaatcgagatgtatctccattaacgtgggaataaagtgtgtcacacgacagtacacgagggcgaaaagcctcgggggggtaggggagtattgctgacaaagaaacaaagaggggagaatccgaagggaagaagttaatttgaaaggaagatccaagtgagagctcaaaccaaaaggaaaatagaatgaaaaggaatgaaaatgagggaaatggccaaaagtgaagtccacagggaaattcagaggaatggcaaaaatcgagaaagtgaagggcggtgatgtttctcttttcgctcttcttctcctttctcgctcctttccctcctttccttcaacaacaattcctctcattggttacactttctatatcggtctccactgcccggtcgatccggggtcaaggggggaaaaagaatatcgagatggatttggatatttcagatatttcgattatttccgatatttccgatcttgactgcttcgagtggtctgagtggtcggagagctctgagagatcttctctggtttcgattctcattagtggaccgaaacctccggccttgacttgcgagctgtgaatgaaagcccaacatccacaaacacttcacttgccgcggtggcctcggattgacatagttcgttggtgacgggaaaggctgggctttcagtctcaatatgagtctctttgagaaacggcaatcggtctctcgtcgagctcatcaagtttgtctcctatgaaaaagaagaagccctaatccacccagcatagccatgacctcagattcaaccattatcatcatcatgtcgtgtctcgggaataatatatgtcggaggatgcggatcgcaagtgacaacggggggcattgcatctacctctgctttcatcttcttcatcttcatcttattctcttccatcttctttaggttgatgctgcaaaacagcatttgatcttcatcaaaaacttcaccagtcttctgaacttgcatcagatctcttagatatttcgctcgcattgccatcatgactgaacctgcgtacaatgccattgaggactatggcctggtcggggacatgcacacctgtgccctggtcagcaaggccggtagtttggattacatgtgctggccagtctttgactctcctaccgttttctgtcgtctgctggacaaccagaaaggaggcttcttcgccgtgaagccctacaagacggtagtagatgctcacagcaagcagcggtatcttccatactcgaacctgcttgaaaccaggtggactgatgaggatggcgtcgcgacgctgctggactactttcctgtcacacctaaaaagacggcgcagtcgtcccggttgttgtcaggatactgtccttgcaatgaaccgggaaccaatcgcttcaagtcaggactgcagcactcgggcctgatcagaaagctggagtgtagccgtggctcaatggaattgaaagtggagttattccctgcttttaattatgcacgagactcgcacaatacccgtgcaaagctagaagacgacttggacaagcaccggctgcagactgtccacttcgagagtgagacagagcggctgcaactcgagatctttgccgattcacgggagccagataagcttggtttcccctcggcgtctttgaaactggaagaacgagagggcctccgtggccgcggattggtggcctggatccgtttgtcggcgggccagacccttcatctggtgttgcatagtcccgagaaggctgtccccagctcggccaccatggcagcctacctcgcgcgaatggaggaggaaacttccgactattggaccgattggacacgcaagtgtgccttccgtggtcattaccgagagacagtcgagcgcagtctcctaattctgaagctgttgacctacaaacccacgggtgcaattgtcgctgcgcccacgttctcgcttcccgaaaatgttggaggctccagaaactgggattatcgatattcctgggtccgtgacacagccttcacgctatatgtctttctcaaaatgggctacagcgaagaagcggaagcgtatgtcaacttcatcttcgagcgggttttcccgcatgcttgccaagatcaggaacccaacagcaaaaggcccttcttgccgctgatgttcactatccgaggtgagtacgacattcccgagatggaattggaccacctcgatgggtacaaaggcagcaaacctgttcgcattggcaatgctgccgttttccacacgcagctggacatctacggtgaattgttggacagtatctacctgtgtaacaagcacggaaaccccatcacctatgaccaatggaacgctatccggcgaatgattaactatgtcatcggtgttcggaaccagaaggatatgtccatttgggaatcgcgtggtcagatccaaaactttatctattcgaagattatgatgtgggtagccctggatcgtggaatccgccttgcggagaagcgtgctagcctaccatgcccggatcgctttgaatggatccgggtccgtgacgagatgtacgacgaaatcatgaccaaagggtacaacgaagagcgtggtcatttctgccagagttatgagagtcgcgaggtcttggatgcgtccatcttgattgcacccttggtattcttcgtagcgcccaatgatccgcggttcatcagcacgctgaagaagattttgcaaagccccgagaaggagggtctgtccagcgccaagatggtgttccgatatgaccacaagaaagccaacgacggtaggtatcgcttgtctattagaactctacaacaagtgctgatactcgcgtttcacaggtatgacagggggtgagggtgccttcatcatggtaaccttctggcttgtcgaagccatggctcgtgtaggttctatggaactacctaaaaaagcaacactgaactatgctaacctgaactgaatctggaaatacaggctgccaaatatgatgtggccattccaaacatctggaaactcgcacttgcgcacttcgataacatcctgtcctacgcgaatcacctgggcatgttttctgaagaagtggccatttctggtgagcagatgggcaactctccacaggccttcagccacctggcttgtattagcgctgcaatcaatctgggaagaagtggacgaatcggcgaatagagtcatctctctcagtggcaacaacgatagactaactataatactgttgtttttgaaccccaaaatttgtttgatgcaattctataattttctgcttacagatagaaaaaaaatacaactttgtgcctttttgtccaacactccgtacatatgtaggcaatgtaggcaatgtagcaaatatagatcatcggcctaggccagcctggaggtgaagacaaatgcttacataatggactagatgatcacacgggagctccagggccggtggctaccccagattctctttgttcatcatctttgactgtctttgttcaagacaaacatatccaaacaaaggaactgctagggtgctgttatcttcagcttctagctggagatgttcttcgccaccgaccctttgtgccttattacctccgtgagcgcgtacagggatccccacctgtctaatggcaggcgccagcttggattgggctgataagcctaacgccgattttgccttgtcatcggatgaagaggaatttgtttccagcccaagcactgcttcaagggagcttgaaggccctgccaagcaaaatttgacgctggctttggggaagttgcacttggagcaagaggacttgaatcaatcctctggacaggactcgactccaacaacaccccacatggaaggcctaattcaaacccccccagaacttgaaatggccaaaaagcctctgcagctactggacttacctttggatattttaaaggagattatcaaagaggtaacactggtcttccccgcagatcatgaatagatagcttacagttctggtgtaccataggtgacccatacgactgatctgacctcgctcgctcttacatgctcctctcttcatttcttagccattccgcacatgtactcccgtttcgacatcgtctggcccgagtcgctgaacccatcaacggatgactactcgggggtggacgctctgtcttatggtttgtccacattggtcatgggcgaggatgtatttaatcagccggcgctgtttcaatctgacaaggtcaaaaatagctgcgtgaattgcggttgcaataagcctcatcctcagcccgacccggaccctggggacaacggagatcgcctccggtcgcgacgaggcaatcattatgcacagtatacccgcacattctctattggaaatggcccgctcagttgggtacaagaatactcggtgaccaaagaagtgggcaagatgctagggacgctagtcgctttagcagttgcacggatggtgaatctcgaagccttcgtttgggacatgccgactggagtggtacgtgaaatttggctcgcgcttgcgtcgttggcagatagaccaggacacgattgtcgcctggagcgcatttgggtgcgctggcatgacaattcggagaatgctctacgcagttcatcggcggcggcaacgaggctctttcagaaatacaaacacgtggaacatccctccttgtcagtactacctccactcaagaatgtgactgttcttgacatagatgaacccgcttatgtggaagaactggcaattctcattgagcggtcacgtttccgtctgtccgaactccgcattggtattgccgaaaaggcccatatgagtccgtggctgttgtgtgggaaggactctgatggctcaacgaattggcctagagctgatggtgtacttggcatcttatcgcggcggcaccttgacaaaaaacaggataatgctatagtttcctcccttgaagataaatcgatgccctctgacgaatcgataaacaagtcactaaaatctaccgaaattgcggctccattgactccaaatagcgaggagcagcctcccagcaccaccaaggacaagaagtccccaccaagctctggtttgtccaaccggagcgcccgctcacagccacctccctacaaatccgactatgagatacttcatctcaaagtactcgagctagaacgcgtacctctttctgtgccaaccctactgccagccgttgactggactggattgactactctcactatcatgcgatgcgatgatcatgaaaagctctggagggctctccgtcggaagtatgctcctcctgcgacgccggcaaaacgcccacatgatgcagagcgtcgaacaaacgccagctcagttgaatatccactaaatttgaaacatattcgcacggacactgtttcgccttatcttatactgttcatcaaagatgcgctggctccgaataccctggagagtgtgtatttgcatgaagccccaggtcatgaatctgctgtgcatatcgacgctatttacaagcacattctgcgaaagcacaggcggagtctgcgaaaggtgttgattgacgccactgaccgtataatcggcgctggatattcaggcatacgatggcacaagtggatgttcacccacgatatggtatcatttgtcacaagtggaaagatgccgcagctgaaagagctgggaatagcgatgcattatcgcgattgggtaagaaaacgatcaccagcattggatactttgatcacacctgggggcttgtgcttgtgctaatgatgattctgcagcatttcttcctccagagattgccaaacatgccccagcttcatgctttgtatctaccacacattcatcatagtgtccatcgggacttgaaagagcttgcgctgcaagtcttggacatcgtcagcatacgtccagatttgaagatcgcctacattggtctccacatcaaatgctaccaaatccttgaagcaagacatgacgataacccactagatttcgacgacaaccccgcgattgaacattccccggagcttagtgaagatgaggatgaagggtgggccaaccccaatcacgattctgaaggagacagcgatgattccgacgatgcctcgggggcagctgacacagacctcctttccagtgacccggacgactacgacactgaacctgacgaagaacagggtgattcgcggattcgttaccggctacaggagattctattctacgacgagaaggtatcaattttcaaggcgcgtcatggtgttttatgatctcatcttggcttgcattctatatcaggagttgtccggaccatttgcggcgtttaaaggggtacagagagtttgcacctacgaacaggagataccatggctttttagcttagcactaaggttatttgttaacctcggaatgacacgttattttgagttaaggttgtgctgagtgggccactctaagtgggtcaaagtggtacatagcggattccaataaatcgggtgtagtacatcgtcaaattagaaatacactttgctaagttcgtttcgctgggactttcgctcttggttcgtgatagcgtttcttcgtgcaaaaaatcctccatcgcgaaaagaatggtaagtcacatgacatggactgaattatcttggcttctcaatattgacgcttgtacttttctcttaggagagagctaaacaagtgtggctcctcggggaatcatatcaacttagcgaattggatggccttgtgccggccatagttcattcaaatttctgccctatcaactttcgatggtaggatggtggcttaccatggtggcaacgagcaactggaaattaattccggacagggagcccgagaaacgctgcaactacattggcgctgttcacttcctagcaacacggccagctatgaccggtctcgaaaatgttgtcacatttcgatgatttcgaggcggacagacccccacatatcagaacattttggcagtctcgcaacagtcgttaccgaagtacttcatcaacataggatcagaggttcccccggacttttcagctttcgcggatgtcggctcgggtcttcgccacgctgggcaagtaccgggttgataatcaattatttgctcactcatgcaagtcataatatcgtagaatttccttatttatgctaaggtaaaaccatgggtatctgagagagagcgctagtgttcaattgttatatacatggcgggacagattcgttcatgcaaactcccggtgtgcgttctcatactgggcacgaatcagctcgttctcgatcacacgtctcttagccttttcttcttcgctagaattgtctttgaacacatggtccatctgctcgagggttcggcccttggtttctggcacaaagaagtaagtccacattccggcgagtaagcaaaagacggcgaagaagatgtaagcaccgtagccggtgtcttggacgagaggcggggtgatgagaccctacagagataatcagtatgcttgacacaccgagcgaccgaataatggtagcgagaaacttacaatgatgaagttgttgagccagttggagcaagttgaaagcgcaacgcccttagcacgaagggaagaagggaagatttctagaactgtcagattgatgcttgtctaacaccataagagaataaagatacgtaccggaaggcagtgcccacgggataggaccccaggaagctccgaaggcaagcatataaaagagtaggaaggccacactggtccacccttctgctttgtgggacggccaatcatccgagtaaattccaaccaacgcagcaataacaatgtgtgatatggccatcagggctgcgccacctagaagcaacttgcgacgaccgacgacgtccatagtccagatactggtagtgacacccaccaactgtacaacgttgagaacgccggacatgataagttgcatgcttgtgtcgagacccatcgtggcaaagagagttggggagtagtaaataagagcgttgataccgatgaactatccatatgattagcatgtgtcggttatctccacgtacatagaactcacctgttggaagaatccgagtccgacaccgatgtgggtacgacgccagcagccctttttgaagcaatcggcccacgactaaatctcctgcagaatggagttctttgtgccaccaccttgtaactctggatgcttttcccggttcatttgctggtggaagcgcacttcggcctggatatccataagctcctgacgaacgcgtctgtcggaaggtggcaggcaacgaagtctgcacagactgtcgagagcttcctcatcgcgaccctttgaagctagccagcgaggcgagaacggaagagcgtatacaccggcagcgaggataaagcccgggatcatttggagcaggaaaggaagacgccaggcccattcaccgtccatgtatcgtgtggcataggtaatccaaaaggcaatgacaattccgaggacgatacaccattcttccataaccaagagggtaccacgacattcggggggacctaataggagagaccggaataagtattcatgtcatatgtgtgtgaggaaggggaaaaaaaagaaatcacatactgatttcggagatgtacaatggtgcaaccatcgacaacattccgattccgaggccacctatcagccgggccaccgtcaacatgggataactgatggcagcagtctgaaggacagagccaacagtaaagatagcaacagcgacgagaatcgaataccgccgcgagatcttatccgcaatccagccctgattgagagcaccaatcaaagcgcccagctcaatcatggccgtcaacaatcccttcgcaaatcccgagcccgggttatgctcatctatccgcgggaattccgtcaggaactggtccatgaccagaatcaccgacacaacaccttgatcataaccaaaaagtaaaccacctagcgttgagcaggcggcacacaagaccacgaatgggctggcaaccagaccgcgcagaccgggtgggccatagggctcgcggtctgagttaatgtcgtcggcatggtgagagaagccctctaccactggttcatcggatagatctttcttaggaatatcatcagtcattttgaatggaaactggaagaaacttgaagaaacttgaaggttatgtttctttgaagcggaagaacgctctgctattcaaactctacccggaggcattccggcgatatttatacccatttcccccaataacctaaccggggtagtgtacaaggtcggttccctccgtatatcgggacctataggaagtctgggggggtccccggtccaaaaggccaatgagacaaaggcgtgataaccaagttggggtagatgacggagtgctagacggttcggccagcgggtttggggaagatcggcgctataggattgtggggaaaacacggagaagagaaataatagcacgtcgtcaattggtggcggctattggcatggtacaaggacgcttgtcttcctctgagcctatactcggcctttgacagatagacttctctcagccccagaaccattcttgggcttggccagaccgagacatcttgcatacggaatcggcatagaccaaggagtcatagggcatactccgtacagccgatttgctctaggtcctgttctattagattgataagcttatacagtctttcgtattcgtgtctataggtatagctagttcatacacactcgggcattcaaccaaagatcgccatcacctatcacatggaatgttctggacaataccagcatcgaaggtataccgtataaccgagccctaacaccctcgggccggacatcactcggaaagtcaagtgacttgtgagccgatcttatcccgtgatggtagttagtgtcgtgtgagacagtaagacataggcatgataggatcctttggatgaatcgcgacactaggtataatagtagaatccctgtgataccttgtcaatatcaaaccagataccccacggggaaaaaaagaggagaacaggctttccaacatctacaatctagctctttttgatagaaaatcggaattcgttgtccactttccaacctgagcggtgtccattgcggtaaccattttcccccctgcggattccagttcccgacttctcccccgccactcccaacctgcaaccttcggacttcccacttcactttgaaatcatggcttccttcatggaagacctgtggtcgagcatctttaccccaggacccactccaacccttttgattgcgaccaacgtcactttcgccgcactccagcttatcttccttgtcctcctcttagccacctacagcctccatttcgtcgccctgtccatcatcagcggtggactatggtggtccatcaactggttcgctgccgaggttcgactggcccagcaggcgcaggaagcggagaaagaaaaacaagggtcggagggtgacgcgaaaacgcggaagagtcccgctgtaagagaaagcgccgacagcgaaactgaaaccgaagtccttgtcgctaggaagacagacgataagtctgctcctgtcgcgactgggagtgcaacgtccgggttgatgcccacggcgcgcgatcctaagaagcggctcagcactggggatgggtcgggctatgggagcactgatagcgagtgggagaaggttgatgatactcaatcttgagtgatatgtggtactcaaggatacacacttgcttcgggatatttacactcgcctcggtggaacactgttgcacactgcacgctcacccaggccccggacatctcgacgaatacgtaggacgcgttcatggtgatacaatccagtgtcgaccttccgtgtaccttggctgggatttggatttgattttggatttgattatggatttggattcgtatatacgcaatgccctcttgtctgtttgtttcggagcgataccccatactatgtagatggtgcaatttacagcagctcgtgcttggttttgattttgctaggagcgtgatatccttcttctctctgaacacattcattaacaataacattcaaaacatcccatccactcgtacttcatacaaaacaaagtaaacagaaccggtggagctgaatctttagaaagcatccacgtgaccttcccccagccaaacaatgaaatccgtcgcaacataacataggcaaccatcaccatcgaacacgatcgcagcagcaaccagacacactagctgcatcccaccatgtccgatgtcccttgatcaaaatgctctccaccgtacccctcaatgtgggacgtaggcgcgtctgcggctccgtcttctcccccgcggctctcgaagctcatccgtcgaacacgaccgcggattcccaacgcgaacagacaccagtcgcatccttccgagaatcaaccgattcctcgtcaaccttcaaaacagactcgcaatcaacctcattcgcgacgattgggggattgacggacgctgcatccccagaggaagacacattaaaccaggcgcggcagacggtaaaagagtttctatctgtgcccaacctgggctttgaattgctttacagcttccggaataccgatggaagtcaggcgttgaaagaatggaaccggctcagccctccgtcgaaggagacgaccgaggctttggagtatcttatgcgaacctctccatggacattgttcgaatggtacgggaatgatattcgaaggcattttctagtcaatttccggactggcctgtctaaggtatggacgttatatgtcgttttgaattcaattggtctgtctgtgctaacggtcttatagatgttaaattccacgggggaagaagacctgctccgaacaatcgtggactgcttacagcttgcgcgtcaaatttatctcgctcccgtcgtgcactatctacttccgttaatagctactcaccaccaaggaggagggcaattggctcaactacagcgtgcctttcatacagtagttcaatacagcctaccatggaagaagatttcaccgcttctggccagagagcttacgcgagatgccgcggttatcttaggcatcgatgccctggacgaagattccgatgcggacagaatgagtctcgatggaacggagatggaaagagcatactctgtctcgtacaaagagtggaggcaagaatcacccgaagcccaactacacatgatggtcgagggtgaagatgactgtgtgacctttacacgggatcggctcttggcgtttctcgacggcttgcagcttgtcggacttggtggtgaccaggcccagaaggtgttcgccaatgtgatgaacatcatgatgggagacttcattcgtgctgcatatgccggcgaatggcagtcgccttcaactgcgccacagcacttggagcaatgggttgaaaatgtctatgcacggctcgctgcgcaggttctagccatcatccattctgatcccgctggaacccaatccggggccatggaagtgagcttgagggacgtggagaagtggcgagcaatgggtatcgctcggctgggcaagcttcgagtcagcgagcttttcgacgtggttgttgattggcccgtaagcggcggggcggtggaggatctgcgacgcttcacaaacaactcgtctggagcacgcatgtatgtgacgcatttcttttctattaacttgctccagcgtttgttgcatcccggtgcttctacagtcgagattttgcaggtttacatctcaatcattcgagcattccatattttggaccccaagggtgttctactagatcgcatcgctcgaccgatccggcggtacttgagagaccgcgatgacaccgtcaaggtgattgttagtggtctattggcggaccccgcgacagccgacggaccgacagctaccggcgacaacttggcagaactggcggcagagctaagcaaggtccaccagcattctatgcaaaacaacaggagcgagctagactatgacgatttatactggttgcccgatccagttgatgccgctcccgactacaggaaatcgaagagtgcagatgtcattgacagtcttgttagcttattcgactccaaggagacctttgtgaaggaaatgcagactctcctcgcagaccgcctcatccaaaaacgccagaactacgaccaagaaattacagtactagagctcctgaagatccgattcggcgattcggcactacaggcatgcgaggtgatgctgaaagatatttccgactcgcggcgtctcgacctcaccgtgcggaatgaccagatattgtctggatatcgtaagcaagcaggtgtcggaaaactccacgccaaggttctgtcacgcttcttctggccggagttccaagagcaagaattcaaggtccccgacgaaatcaccaaactgcaagagcggtacgcgacctgcttcgaaaagcgcaaggattcgcgcaagctcaaatggcgcaacggcctgggtcaggtcaccgtcgagctagagctagagaaccacactttcacagacgaagtgacaacctggcaagcaaccgtaatctatgccttccagtctgactcgagcgaacccgccacaagaacaattccggaactcgccgaggagctcgaaatgacagttcccctagtacgcagtgcctgtctcttctgggttagcaagcgcattctcactgaagtacaccgcgacaccttccgcgtgttggaaatcctccccacggaagacgaggaacaccatgcgcacggaacgggcgactatagcgacggctcagacagcgaagcaggcgacacggccaatgcagcggcagccgccgaagcagcagccgccgccgcagcgaaggaatccaccgaggcagctgccatggagaaaatgaatgtgcattggcagtttatcgtaggcatgctcacgaatcaagggcctatggctctgaatcgtattgtcatgatgctgaagatagctgttcctggcgggttcccgttcagcaacgaggagttgcgcgagtttttgagtggtatggtttcgaagggcaaattggagattgtaaacggggggaattataagatcgttcattaacatgggcaacggggcgtcgcatgcgagcttttttatctttggcgttgctggaaccgatgtacggaatacccattaaagaatacatgtatgatttacgagtgatagattacctcaattaggtagatccaagccgtggagtatctagtctttctctaacgcgcccctttttcttgtctacatgcaacatgttagtgaagttactgttctggcatgagatatatatagacgagccccaccacctccccgcctacacaaaccccaccaaagcccaatcccaaacatctcagagaaggaagaaaaagaagaaaaaggtatcatttcaaatctataagccacgacctaaccaaagcgagcatcattccgcatccaaaagcgcaacaggaacctgattatcaacctggatgccaccgcgcttcttctcatcactatcccagaagggcaacttccagccaccctcactctcaggcgtcgccagccaaagacgcataaggtggcggcggggggcaggaggcgcgtgatcggtgtactcagtgcgggcatgcaggacgtgcgcattcgacaagaactgaatatcaccaatatcgagaatcatgtgcagcgacaggcgcacgcaggttgcttccagcacgcgcagggcttcttgctgagcttctgacagcggggggatgattcctgcgtcgctgaagcgggtgagggagcggacgtagtacgggtcccatctgtttctattgttagatgctgaaatattgatatgggatatgggtggggggagaacttactttgtgtagacacggccgttctcgccgggctcgaggtacaccacgctggtgcgaatgtactcgtcctgtcccttgcttgtctcgcccttgcggtcgaagtaccagattggctctgtgagggtcttgagaacgtctgggcgttctgcggcgagggtgttgtagacggagtgggaggagacgaggtctgattcgccgccctcgagggccttggcgatgcagaggagaccgacgatgtcgcagtcgtcagcgtggaagtattggctagttagggattagttgattgttcgtttcttgttgcgcattcactagagaaactcaccgagcattggtgcggtagatgcgcactttgtcgatctgggtggagtcctcgccgagatccttgacgtggccaaggacgtggccgcggctgttctggctaacgaagtagccgagatatgtgccgagacccatgtatgccacggcggacttgtggttgccccatttctggacagggaagcccttgaagaggatgaagcccttgccgtcgatgaggtctgcgcgcaggtcgtgcaggtaggcggcgagagtggggagttcgaagttggtctattgaagtatgattagttctgggtttctagtttcctagatgtgaattgttctcacctttgagattccggtcagcggggtcttggatgcgatgaaagcatccgatgccttgctcagctcatcgatctgggcctcggtgaagacatgtgtccatttttctgggtgctcgcggtattcctcagccttccacactgttgggccggtgatttctttagggaacttttcgaaggggacgagctggtcgtatagcgggggatgttggccagtggtcttcaatccatctgggaacaaatcccacgagatgggccccttgagatcatgaggggcagttgggagaggggagatagcagcgggagccattatgaatgatttttagagaggaggtatgttgtacagatgaagcactaaatgaagggccattggtttttatttatattctgtcacttctattgtcgacggtgagcaatgtagtggattatatggcgtgacgagatcagataattgctcttgtataacaaaacgagtgcggccaccaaagaagtgaagctgattgggggtggaagagccgatatggcgcaatttgcggggtaggatgttgtgatggcagtgggggatcacgaatttggcttcaagatattttcgagataggtttattgacgagaatgggaagatagacaggatgtagaaagacttgaatgtgcgaaattactagttgtgaagtcgcgatatagtacttgacgttgaaacaaggtcacggtacctggggagtctaggatctacttattcaccaccatagtacatattcgatatacatgcacatctctgacatccacttgcgcagccagtcagagtctcggccgatagactaggccgctagactaagcttatccattgtcttctagcacaacatattctgaccacagccgatcgtaccgacaatcgtgcatgcgccgggtggtcgggttgttcccagagaggaagtgctctagacagatctattatccttgtagctcatgcaatgcatgcagagaatctatcgggcgagaggtttgagttctaccgttttaccttaaatatagttggtcttagggcttcggagagcacatggtaatccgttccttgattttaactcgcaaggttcgaatgttgcaattgataaagcacgctgtgcccctgaatatatctcgaaattctttcattcttatatacatctagccttcgaactttgcatatggtgcttgctctcgtgcttcttgatttgatacctatcaatggtctttggatacacgatttcatcttttgccttctttcctttttgcgatattctcccagctttccatttccgaataaacaatgactttgatctcttttgatgtcagtcttgctattcttcatcagctttctgcagacaaggattggctttcctatttgggatgccccaccagattactcaaatccttatcgggcgtggggacacgaacgccctttgatatcgaagttttcatttttgtgtatttgtagagttatacattcctttcgtttagcacatacctccatttgaatagatacccaagcccatggcccaacgcatgattcacgtggccgcgctagacgccgacattccatgcctctcagtatacaaagcgcggggtctatatagctcgcacttccgcgtccttctgcaagcagctgccgaacgcctgaataagaacccagaaaccctccggaacggacctctcgccatccatataaccgccttcgatgccgtaggcgggtctctgcctcctctggaaaccctacgaaccaaacctcagtcgccagccgagcttcacgccggaccactgagtccaatagacgcaatcttaatcacgggctcagcagcctcggcttatgaagaccagccctggatccatgcaatgcaatccttcatccgaacagtgcacacccactaccccaacataaagctcttcggctcctgtttcgggcaccagataattgcgcaagccctcctcagcaatatcgccaaccccatccactcaccaatatcaacattccacgtcgagcactccccagccggcttcgaaatgggcatccagcccatcaccctccagccctcctttaccgcgcacttcccgcctctcgcacgcgccacagctcagcacccattccgcatccagctgattcacggcgacgcggtggtgccgacacccgaggccgaagctgccgcggacgatgcgggagtcgcgctgccggaaccgtggtccagtatcgggaatagtgcgcagtgcgctatccagggtctttataaccccggccgagtcctgacgtaccaggggcactttgaattagatacttttgccactggggaacttgcgcaggagtttggacgtcgtgcggggtggtcggcggctgttgtgggagggtatctggagcagatttatcgttcgcgcattcctgggtttgaggatgatgatgattctaaggctgctgctgaggcggttttgttgttctttgctggggaggatgtggattctatgtgtggtattgatactgggatgattacgcctccgctggattgattgccttttttacggtcgggtagacatgaagagtaatggtatttggcgttattagctatatatttctatcagttgttgggtattgtgtccgagctggtttcgtttcggcgtttcggcgggcgagtttgttcagggtaatcccttgaaggcaaaccgtgcgccaagggtttcagatgatactgagcataggacacgaataggagttacgagttacaataatagttcgtcagctctcagccccttagtgacgacatactaggttaccgtgatcgtgttggaccctgcatggctgacacgcagctggtatgctggtctgcaggaagggattaatgcggtctgaacaaggctggaaatcgaattacgcgatacaatggtcatagttcttagatccgagatctcggatggaattaagggtagtacaatggaatataacaataagctgcatgaagctaaaggcgccttacatgaaatctaggcgataccgataagttacattgtccagaacaaagtcgcccgaagtcgactcgcaagctctccactttgtcattttaagtggagcgtgacatgcttgacatttctagtgtatggatagatagtgcagtctgataacagccttattacattattcttccgtatgctcaatatggttactactactattagtattcgatattgctcatacaatgtacctcgtacggcataccaaaacctcgaactggaaatctcagacttttctgttgatcccctgcacggccacccagaaccgggatggcgtgggagttgcaccaatgagaatgaaggtaattggagagtcggtggggactgggggccaatcatgctgcttttggatgctcttcatcggcattttgttatacagggtattggtaaggtactggtattggtgtttggtatttggtatttaggcaggtaatctagaaagctatgcctctagagttaagaataaatgggggtcagagctgacagatacttggaagatctgggaatcggatactcgagagagatatacaatatagtgaatggctacatgtacctaggtatgtattcaagcatactcatatttcaggtagggcataagaagtcacgcgctctaccccttccattgctctatcgcatgatgttccccaatattggtcgaccaagtataaaattagaaataacataatacaaccatggaaatctccaataataccatacgtaacattacgctgtaacgtggcgctagttcgccacccggagcttccctcccttctggaatgaagctcaggagctggggagagcttcagaggggccgctgatagcgcctatcgcgacatatttcggtttctttccttttgcccgggttgcgcattagaacagcgctagatatgtgtttattttatgaatagtccgaataaaaaaatcgacattcatagatgtcacataaccaaatttataaattcaatgatattcgctaagagcttcggtgttccaccggggtttccgacgaaccgtgctaatcggttgtatttaaataccagttctgtacgataccgtatcctttttttttttctttcatttttcactccttttccttgttaatttcctcgttaatttccttttcatttcctttcatttcctttgtatatcgttgaattccactttaacaagtaaataagctaaattccaagaatgggggttttctttaccagggaagctcaaagctgcacgcccctcttttggttatcgatactcgataggcacgatagccaggtattcgagctcacaactacagaactataccaccagaagtagagagggaagctattccggacgagaattaatagcagaattggaatccaacgacagatcccaaatattcacccaatcgaagaagcacggagtaaaaaatagaataaggcgaactctgcgtaattacccgtaatacccccagtgactctcccacaactagccctcgaagtactctctgaatgtactccgtatgagccgccctctcgtccttttccttttttttacccttttccaattcttcccttcttcttctctacacacagagcatgttgaactgcatttccctttcttgttcatatcaaccctgtctgtgcttggctgccctctttattcgcccctcctttttttatctcaactcccgggatctcggatgatcatatgcaccatgcctcctcgaagctcactgaccagctcgttctcggtaaccgatgccaataatgaggtggtctgtcccttgaagaacaatgatagttccaattgtcgcaagcgatgtctcggtgtgagtactcgcccccaagccccacctatcaccggcgtgcgagagctatacccgtgcaactcgggagttccaacttgaactaatccggttggtgctctaggaaaaacgctatcgctccatgcaggagcacattcgacgtgcgcacccgaaccactacatcccgaagctcccggctaccgaggagagcttcctgatgatggtgaacaccccgctcgagcaacgggtgcagctgtcacctcccgaacccgctcaacctcgtcgacctcatggtcagtttttgttttttgttttttttgtgtcttgattgccttgcttggtcgctacacgtactgacggctatgcacagatgtggcgccggaaagagacatctatgtggcggacggctccccgcctacccctcgagctctggatgaaccccacccagctgcggccacggcggcggtggctttggcacaactgcatcaccatagactggcctcggattgggatacagacatggtttgtcgctccgggctgttgtgggcttcgacccctgagtctctccacagtggcactgacctgcatttccccaggatacccattcggataccgacttgagtcatcctcgcatgcgcggggctattgaacttcccccactccgcgaccatttcaagcaggaatcccttccgccgtttacgcctcgtccgcgcgagcttctcccgtccatcctcaatcactccccgcctggtcgctcatccacattaccgccgatccagcggagagacaaattttgccgcccgcgcaaatcttccatcacccaatcggcccggaaacctaagcaggatcgccccaagtcaaaggaattcggccggcgaccaagcctcggtgaccgcaaagccctttcggcagagccgcaaaccgcggcctgggcgcaaggcaagcgctgggaggacttgattgaagcggcgacgtcggcaaccgaagtagacgatgagccatattcagaggtgagttttgatgcaattctggaaaattttctgggtactgatgcgccagttcaggctggtcggtctccaacgattgccccactactttccagcgtgacttctgccccctctggggtgaaaaatcggtcctcgctaccacccgctttccaatccacaggattgcctccgatctcttcacataggccattcccaccgcattcatacgccgcctcgcctttgcacaaatcattgaccccaccaccatacgagaatcaccgcagccgtgagagcgacttggaaccattcccatctattgaatcatcgctcgattccatgtcttcagcatcgggtagaaattttgcatcatcggtttcgggagtcgcgccgtccataaactctgattctagcccagttatgaatcttatcccgtccttgtcccagcgccaacatcaccgattttccaaccctactccggcgtctttccgcaacaaggaggttcaggtgttttgcgctcagtgcaaacgaccctcggcactgaatgagtgctatgcttgtacggagtgcatatgtggcgtttgccgcgactgcgtgggcatgttcatttcaagtccgcccgcttcattccgaaccccggggaatggaccattaaataatgcctcacaaggaccgacaagctaccctggtcctcgtgggtgtcctcgctgtcgaacggtgggaggcaaatggaaggctttccaaatcgacatcaagtgaacgacttcattaagacagcctacatttttggcattacgcattttacgactgatgtttggtacacgttcattcttatattgttatttattcttcattccatcggcatttccggttttctgggtttcttttttttttttttttttttttcactgatctggcaggatctatcatccagacgatgttgcaggagttgcttttctttttcaggccaggtcttttcggcgcaggtttccgacagtcaacaaaatcccgaagaagctggtcttcgacattcaattttctacgttctcttttttcgcattctggtggacaaatctttggtcatgaagtatatgctttgatgctttttcaagtctttcatgtgatgcaaacttgtactgcaatgatttcattttctgtttatagaagagagctgtggccatgggagacaggcgtgtcctcccacatccaattcttgatttatataaccaatctactcatcccagatgacactgctaagaccctccgcagttcccacctttccaggctcgccaacctgtagagaagcaatctcctcacccaaattccctgtcctcggatcccggcgcacaatcgcgaccgtcgcagaagcttgatttccaacggcaaccaggtctccagcacgattgatcacaaatgtccgcggcaccttgccaaatgcagaagatgagtcccgcaattcaaccgacccatctacaggagaccgatcaagcacaaccattgaatcactcggcgcgaacccctgatcactccgaatcgaaacataaagcgcattcccgattctactaatcccagccggcgtcgcaccctccggcataacacccccgggatacagcaccagtgtctgcgtctgttcaaaagacaaacacccagacctcgaatacgaaacgtcaaacaccatcatcgtacccccgatctcgttaacaagatagaacatcgtctcgccgacagcggctatcttccgcgaatgcgtcgacccaacctcagaccggccggtgccatctgtccaaaacacgccgtgtctcggcccgctgccgtaggtaatgttcacgctcggacactctgacagctttccggacgggccatcctcgatcgcatacacgcgcagtagatccgcgccgagatccggactgacgatgaacgagccggtcgggtcgaggatgacttcgtgcgggtgcggcgagtcctgctggtcgaatttgcccggtcttgtgaggttgaaatggaaggcttgcaggcttgattggttttgtttaataggtagggcgaaggttgagatagctgagccttcgctattagattgttagtataggtccacaccacatccacagcaacacaatcctaggcaaccaagactgggcatgtaggtaaggaagaaatacatactaatgcgcaattgcaataaacttcttccccgcatccgactcataaataacactattgacgccaccaccgacagtcttcgcgaccgcgccttgacgcagcgtgccgtctggtttgacatgcagggccgtcaacgtgccattcgtggaaggatcggcagttccgctctcatcggagcagtagacggtacgggtctgcgcgtctagggttaaccagctcggcatgtcgccgcaggtcttgagtgtttgtgatatggagaggtcattgttcttcagggctagggtgtagacgttcccattgtaatgggttgcccacaggtgggctggtttggaggtaataatggcggctgaggttattcccaaggcggagaggatgggtaggaggttttggaggtgcatttcagggctttggtagatgctgctacctgaaatctggtgtgatggattgatctattggtagggagtactagtatatgtagtgatgcaaagctgattggggtgggggattgggcagacgcggtaggggatcggcagtccctggctgtctaggaatggacgaggggaagaaaggggtacgagagtttttagggaccatcatgacaaagggtttttttgccaaaggggtgacattattattgtgtttatgttgtgttgctttagtctgtttccacaatgctgtatcgtgcatattaactatcacaatggctaaatgaattagggttaatcccccacattgtgataaagccacgagacagccacttcgtcacggttacatgctagctttcatcccatgttacgtgggggtctcttcgtgactgcgagggtggatcgataacctattcttcaatatatatgtttcgctaagagtcaattcagtgtcaaatcaatgtcaaaccagtgaagcaaacagcattgcacacaagctcggttccaacgacaccgagtacaagctaccacccaggttagccacatacacaatggtgttcgccttgtccaacttcaagccaataggctcgtggaaatgacgaattgccggtcctaaatgttgggcatactcgacaagagtaccagaaatttgtcatatcgtgccccaccatgacccctaggtgactttagactatctcgaaaagaagctagcaaatcccgctttattcagattcccacatgggagcaagctgggctgtttaccttcaattacaaacatatacacaacacgattcgtctttacagatcttgccataccaagtttgacatatcacttggccccggatacgtctttgtccctacacatatacatccaatgttttatagcgaatatcaattcagttgcaaaccctatctctggtgttggatatgtggcttagatggtaattggtcgtgggataaagatagtattgaagttgttcaccaaatttgacactatgaaaattgcacttgaaaaaggcgtccattgcaaccactatcttcctgcttatcattctcctcaacgctaaccatatgcatttccagctattcttattcttctccaggcataaccggacgtcttcgctttacctcatccaacaggtacagctgcagttgataatcttcatcagctgtgctagaaagtccacgtttgagataggaaaaatccattgcattttgattgccgagcgcatcgagcctttgaatttcagattcggtgtatcctttctggcgcagctttgcaaagttgtaccgctgtgtattttcaaggatagtgagcaagttgtgaaggcagcgtcattctagcccaagtcgcggagcccatcttgcatcttctttcgagggggagtcagagtagaaaggtaattggtgatgacctctgcaggtggctctctgggtattgtattatcagtgattgcgatagcatttcggttgagctcctcttcggacaggagtttgagaattttcccagtatcatcaagtatccacagtcctttggggggtggaacaaattcaggttgttcgtctgccgtgatcgaagactgaatgatggaagataacgcagagatcaaggcctggagttgtgttcttaactctacctatgtgcatatgtggacttctgtcacacaaggaccaactcaggattcaatagatgcgtcagaatgcgtttatataaggtttgcggcccaactaggtatttttgtgcaggacgtgtagggagtatatagttctaaggttcctactgatggtttcatcttaggttaagctagcgtccgaaatacggtattaaaaactgaacatgaattgattttctccatggccaaacagattagcagataagattctcaccctattcttaccctgcctattctttttgcacttaaagtcttttcaaaccctaattactttgctctatatacctctcccacagtcagtcagatacatacgaccatagggtgtggaaaacagggcttcccgtccgctcagccgtacttnnnnnnnnnnnnnnnnnnnnnnnnnnnnnnnnnnnnnnnnnnnnnnnnnnnnnnnnnnnnnnnnnnnnnnnnnnnnnnnnnnnnnnnnnnnnnnnnnnnnnnnnncgccggtgagttagtagttgggtgggtgaccaccagcgaatcctcactgttgtatgtttttgtttttatttgttcagtatagcaataatagtatgttcatcttaggccccattgtagaagtctataatgactttttagaaattaagctgaacgagacataagcacttgacgtatctatctgacgctatgaccacagcgcggtaacgatgagatataagttgctttaccaaccacggctatagttcagaattctcacccttgaggtgataggggccaactcactctaaaccttgtcagtcctagaaaaatataaatagtcaaaccccgaggcgcttctcttactctgccatgtttttctttgaatttctttgccaactcaactaaaatatgttctccgaaaagaatatcccgaaagcactctaagagcgtctcgcacgtgctatatcacgtggctttacacgtgaatatctgagattttgtaaggatcgcatggtttctattggataattgtcaaagtgcaaggttgaatacatggattttacatggtattataccatatagatcacatgacttcgagtactcggcataaccatggatatattacgtttagtcatcattaccgctcagattgttgaaatagccgtcttaccgcccctatacctgtaccaggaaagacgagagagaaacgacgagagagaagagtgaagggagaaaagacgagacactagggacgtgtggagcacttaagtcgttgttctgtctttctttctcttttcctcctttctgtctttagatctttatacgattttctatcttctcttcctttcttctttcacttaaactatctctaaggttatgtttgaaacttcaaggaacaaaacaaaataaatataggtcttctacggcgatgaatctgagtaaagccataaatgcactctgcgctaccagggataagatttaacatccgcagtttcatcaactgatgtatgaggacgataggaataattgaatcttgtacgttcttctattgttgttgaatgcttcttaggttgaatagatattgtactagatagttctttagacctatttgattcaagggataggctgttcagttactaggataatacttttatgccctttcgtatagagaggaagatgaagccgtttgaagtgttattatagcctagagaaagaggattaggtagcctgataaaggagttgcggaaggactaggatatataggtaggtatattgtgctatttcttatgctgtactgcttattggctgacctggtcaaaggtttcgtttattattattacgagaatgtaagtaacgcggattgtccggtatatatggttacaacggactctagaacgttatagtctattagactagacaatgactctatggtatacttgttcaattagtcttacttgattgaagagttataatccaataccttctagtcggtcactgtaatgctagattctcgactggatccagaaaatgcattcagtttaattggtttctgtcttaaaagaagcaattatcgccctatcgatacaaccgaaagaaccattaacgcaatctgatcgaggtaaaggatctgccgagcccctcgtcgacctcgtaaccttgaaagagtttgtaaccaggagcaattccgtaaccctcagcacctccgtaactttcggcctaacctccagatggacgtcctaacagaaggtcggagcgaaatatgatgcgcatcgtatctcatatattgagatattggtgtgactttctaatagttgcgcactttcgaagtcaagaagagttactacacgactatctctgtcatagagaatattgtgctgtccaggatcatcaagtcggaagcccacttgtcgcaaagcatggataccattaaggcagtcggactgaatgtaagcccgttcaccctcggataggtcatgccagagtcggtcaagccgcattccggctctctgctctagaacaagaacatagcctgatggaaatatagttgagcaaacaatttcccccctggagatccacttggcgaagttgcgacgtccggccggctgctgggcccaaatgcggttgtaaacttccgcctccgcttcaaacctaaacgtaacaagttagtaattccaatagcaagctattgaagtaatctgactcacagctcatcgtattgaggtccccagcacttaagtatcaccgttgatccacccatagttgctagccaggtcgccttgttttgaactgttggttctgataatagctgaaggcagttaacgaccctaggggtaggtccgccagcgttaataatcacactattcgatgtgatagtctcttcttggttcgccatcgacggggagtagtaagctgaaatatcaagtagacggccggagacccgggaaggaggagggcctcgtagcttctcagtatattagcagcttttctatatcctagacagttgcccaaatcaatacttacgtttcttggcttaaatgtctcgctttcaacgtactttggccccgacacggccattaaacagaaaccagcaagtaactggcgaagggaaggctgtgtaacgccacgccaaataggcgacgaaaggagaaaagaagagtcggcttctcgtttaacaaaaacggtggagttgtaggtggacagaaatccaaaccgagttgaacatgtacgcatctgagcaacaagttgtcctaagcaaagggccaagagtcagcgaacttgacgtgaaagtgagagaatgctaggcaggcatacctatcagtggctcgaggcgaaatgattcgggccggttgatatgaagatcttcgtccgagatggtccagggcgttttcatttctccaaccagatgaacgttaccaggtctaaggctggtcgcaaccagccccaaacatacgtctggggtagtcatttgtggggtggagattgcctgaaaatcagcaaatcgggttgacgccatacctggcaccaattcgagggctttgataactgggtcgcagacattgcggacaaacctcccggttaaaccaagctcattaccgactgtgtaaagttccgtctcatcgttcagtggaacttcatgggctatgccagcttgtaggaacactcggcaagcgtccgtttggaatgtactccatagagacatataggcgactgacagacggtcggaatggattgatgggttcaatgttcctccgttctggcttacagctggagtagctctagccaactgcgtctgggctggttccatgttttgggagatggaataatcgttggaatgacaaaaaaggttctgggaccctgagccgaggggcttactgttatcgacagaagtgggaaaattgaaagacgatcctcagagaggacgcaaaagacaaggcgagaagaattcacgaacctcagaggacgcaacaaatgacgcgaggtgggataaggagatgttcgtagaagacgaaggcggggcaaattcacgatgctcagcgaggacgtgaaagaaaaggcgaaaagaattcacgtagggctgaaatatccagtttcttcacagctgtggtccactagaatcaactacgggaagacttggtgaatagatgatgagttcaagctgagtgggatgtagaaaagacttggcagagtgtataagacttcggtcgacgggggcctcacttctgcaggaagtgcagggtccacccgtggacccgtggacccgtggacccgtggacgggtggtgagattacgtaatcatacttcgggcccgcgcactttctcggttcggtattttcagcagggcttatagcacttgagggttctaacatttgaaggttctcctccagtcatcagtgatcttccccggggtcggatctttccatccttcgggaggcatctctactcctaggcaatcacactaccattaccaatttttcacgtcctgatcttcggtttcctgaaataccaatttcatattggaacgaccgtggtcgttctgttttcttgtctgttgtttgacaacttcaggggacacccagtcagcttcttccggtcggaacatctaaagttgaaacccccgattgggaactatatccagcatatctttcatcaattacagagcttatacctattttcactaggatattgttaattgagggttctagtctaggtaaaggtaggggaccctcacccgtaagctttgtcctggtccggcggggcagtgaccgtcactccagatcccccttcagtgacaacaacaatagcagtggctgtttccaaattgaaggcatcttctatgtgagccgcaggaatcaccaggggtaccggaatatcatggttcgaatccaagcggtagaacattgggaatagtatccctgcaacggcaacagccgcggctgctagcacgcccacttggcgcttttcaaggctgcgagttataagtaccctatccgagtcttcgaggacgtctataacggcttggtaacacgccgagtcaagttctgcacacttactgtccatcacggaattgacgctgtcctccaggtctggagacagaaacagcatgatcccgttttcggctgggtcgcccactgcagtggcatcgagcacatctcctgagagagtaggagttgggacctaaaacgtgttagacagtttccctgctttaaaccgggataaattgcaagggggacaaactccattggtagtatattgggcgagatcgccaacgaagaagtaatcatcggcaccattgcaataagagagtcaagagaataagagcacgagagacgaagcgggcggcattacttccaatggacggtacaatgagtgtggctattacttgaattgatgagacattacgcattatatagccatgcctttcaagaaactctgtgtatacctctcatccctccaatttactttaaataagggtttcgtacaaaaacgtacaatcctccgacggattaatgactagactacgctttgacacaacccacaaatgggtccaaacgttagacccaggacccatcttggacccattttcaacccaactttttgcataaaattcctaattaggaaggaaacttgtcttttcaggactctttatgatttgtttatgattttgtacaaaaagttgggttgaaaaatagaaaaataacccattttgtcggtcgaaaattgagttttgtcaaagactattaatgactagaatactagcgttggatatcgtacaatcgtataatgggagaacccttcggcccccaagctagcagtaagggactgccttcgtaaatggggctccatactagttctctactagtacagcaagtgactcagaaggcggtggggggcactggaaggcacaaatatctccatctatcatttgacccggatatccagcaacctgctacaatgaagcctaacgcctttcagcgagaatttcacgatacgtgctccgatggcgacatgccaaaaatccataagactcctccatatcgcgtagctcttgttccttggctactagcttatcgaaaaaaatatcttcaagtaccttgagtttctttttccaagctctttcttcatccctatgtaaatcctatatcgacttctctagccttcgtttattctgctcagctttccttatctacttttccaaatccgccttaagctcctatatctcgatggtataggctgtattcttctaggtaatttcggtctcgattacctgtttgagcttatttaacttgagcttataagcctagcgagctttgtatagatccctagcgattataatacctgctttcgtctcgctaattactttcctctggttaataattttgcgctgtagttctaatacctctagaacatacttttcagattgaagtataagatatattacgatacggcgtattgtcaggaccccagtactaagaaggctgatgcctgaagtatgacacctgtcacggtacgtggaagcacgcgtcccgggtgcgtgggggactgtggactggacaggagcaatgtatgctgcctgcacagcctctatgggtcatatgacccataacctatatattatcctcgtatgctgcttctttagggaagtagctattagtttctaagatactactatatatactaccatctctatttcctaatcctccattatatatagcattcccttaggtattctatacctaggggtcttatagttctaatagctctcaacttttatggacctctattgataaatttttggaaatgaagcttgacgagacataagaaccctcgatatatagggacagaggtcaccaattggtagaaggttttgtacagctgggatgaaagaagtaggtacaatgtcaattcggaattttattcatggagaaggaaggcttaggcctaaggactagctattatatatccctctcccccgtttgtcctcctttaataattcagttaagttagcgcgaaaagtcgcgcggtattatataccactaaggcggtgccgaagtattaaacgcggtgcattaaaagtgcgagcggcaagagagatactggtaaattcttgattctccaaagcctggatagctaatgagatcctatcctcttgctctattgaatctgtagataattgggagcgtattggtggcatggtgggtggttgaactaactaagtcctaattcatggaagcgttttgggtagggtggccactcgcttgtgaattatattaatagttgtattaggtgataatgaatcccgaattcttaaaaggctagtttgaacttgcatttatcgtgataagctatttctgaaccagtggattatcatataaaccaccatcaactcgaatgaaaatccaggaagataacttaagagaaagaggcttgatctatcacacgtacatctccccagtagaccattcgtatatgatttaagtggaactgggtacccagacttggtagtcaaacggtaaaagcatcctagttcatgtcagccctgaataggcaatcgcgtaggcaacgtactcgcaaatctgtcggaacttgacgcgaatgttttgccgctccgagaaagtgcaattccagaaccgggtgaattccaagggctcgccaggcaccttctcccatatcacatatgtgacaaatccgcccgatatgatatctcccttatcctgcttcccaaactgatatccaagaagctcgggaacaactttacagcctcgctgcttgaagtgcttcagggcttggagctctgggggctcgaagggcccgatagcctgggcagctcggactgaagccttttgcaattctgttccaagccagggtatctgctggtagatacgcaagaacccgaggggcccttgcgcaccggaggggcgacacaaaacctttccagcaacgtatgcaggacccctaccatcaatgaaattttgctcggactgggtcacgatattcccttcaatcttttcgactatctcccagatcttaggcatgaagttaattaggggttggggcggagtgttcatcgtaatttgtgtaccttcgaggccagagaggacttaaccagagttggaagagttagacatgataggttagggattaatgatgttgcaaatgatgcgattggagtgactgatagaaagagacttgagaaagttgcccaggtaagagcttgtcaaccatgggtaatatacaaaccttggacgtaaaacatgcaaacaacccaacattccctaacctcggaaccacctttcattaaatcacctcttcatttatcgacgtatggctttgttctggatctatctcgttccctgagcccgtcagagcatgatcctatgcataaaatcaaaactctcagatacgaggctgtgactttggttcgcaacgcaacgtcagttcttatttaattcacagaacaaacattatatagccagtacattagcctcggggagctgtatctgtgtggtataataggatatcttcaatgtcaacgacaaagtcctttcggagaggtagaggtagaatgaagaaaatttatcattgggtaagctaaatgacatttggggtgtaacaaccttcgaaacagtagcggtttgaataatagtaccttcacgatttaaatctactccgcgaagtcagtttctgaacctatatatcagaagaccttttccgtttcctagattgccactctgcttcccgctgaatcctctcaaacttcatagtttgcgttcgtaattcatgcaagtcatcgtatccctcatctagttcctcgtagaaactgaggtatttctcaaacttgacatcgatgtcgcttgtttcatgatcttccatgttgaaacgcaaatttcgcgcgaattcttgaaagtcttggtcgatgggtctatagtcaattggctgtttcccaagaagggcatttttgaaccaaaactcttctacttggacgatctcagcactgcaccgtttgcaaatatttagcccaatttccacttcaccggcgcaaagatcacagcagtcgatcccctggtctttgcattccttcgcaatagtccgccagtattgaacctcccgagtgacaattttgtaaatgttgaaaattcgcctggcaatggatggataaatgtatccaggttcctgccaagggtaatgattgcgtaaaaagagatacgcgctcatcccgggccgtaacgaaccttggcgaacgggaggttcgcaacccagagataggatccaatctacaaattgaaatccttctgagaaaataccataagaattgttgatattccacctttttccagctttatcctttcctaggccgcggatgttcgggaccctatgaatccgcgaggtgtgatagacatcatggttctcaaacgtgtttttgattgccatacctaaagtctctggcgttggtaaatcgggtggtccatcaataagaaagacgcataccgagctcatctggcgtccagcatcgtgtttatggccgtgggcatagaccagaacacacccgtccgtggaaacatcgagattaccgaagttaaaaggctccagtgaggaatttgacaaatgtatctggtcaaaggaactcgatgtatgcaaaaatggttcttggggttcgagttcccctttcttgaacaggttgtaaatgtaatggacgatatccctagggattgcattgctagccaccaaccgaatctgaaatcccccgccacctattctcagacaaattcgtcggatggcagcgaagaggatatgtctcgtatttcccgcatgaaatttagcgatgatattcttcagcacttcgatttcacattcgtttctcaccaaaggcggcagacaagttactcgccgggggctgtacacggaggctgtaacaagatgctcaaatgcatcttcagcaacggcgatcacggtcaactcccgaactttcacccagtttggtagtaggaatgaagcatatgtcactgaagcatagaatttggtttgatcgagatgatgtgatcgtggcatcctggaacgtccagtccactcctcctccatcatacccaggcaggcccaacttatcgatagaggagtctcttgtaactttgtgatgatttgtctggcgaggattttcctagcgtgatcttgggttgattgtagcatcgtcgtcacattgtctcttgtcactaaaaagcaacgatattgactctcgacaaaggtggcatgtcgaatgatccccagctggttgtccattgcttcgaaacttttaagaccccgatgatagctgtcttggatgcttctatcgttttcatccgacatgttaggatgtattgctgtgaatgtggaaaatatgtcggtatctggatgaatcatgcttgcacaatcattctccccggatgctatgatccttagtttgtttaatatgtcctcgcgatatatgtcacgagcccactcaaagacataatcgacaatcagtaggagttgcaatgccccatttctcgatgtaatagagcctccccatagatcgaagatttgctgggagaaagttagcatgtgccatttttacaggaaacgtctcttggaacaagacccgcaggttaaacaaacatattcagtagtaccgatggtcccaggtttctcgcctgcatcattatatacgcatgccacagacactcgccaatcctctcctctattcattagtaaccagactaatggatcagcctgctgcttcgcgtgcggctcagtcatattcttcaacaactcctgcgtgcataacagagtccgcaccggaaacgcggattgcaacttaatggaattccaatcgctatctgccgacttcgccgacttcgcttcgagaagaagaaacgggaacaccactggatctccatcctcactgagcggcggatctcccaggatctcatgaacaagcatatcgtgatcatcctccgctctatgtatacacgctgtatcgttcaagaggttttcaatgtttcgagtctgccgaagtccgtagattgcatccggttttgttgcacttggtagttctttctggatagttgagtcgtggtgtactggttcatcttcccgatggccaaaaatccgattcaacccgacagcttccattctgcgtggcttgttagtgccagtgactagcgggtgatgtgttcctaatctgtaactcacgaatcctcaagtctgaagtctcgcggacaccgacagggctctcgtttattctgcctaacacgcagggcttctgtcatagtcgagttcccctcacttgtcgcttcgatttctgaacgccatactcgctttcgacagaacttgctgggttccaatataagccatcttgttaatatcgttggaattagaattcctaccatacgacctctgaagtaagtcgagctaatgcgtagggttcgcacgcaaaccgccaggtcgactcacacagcgcttagcccgctcagagagttcatcggcatgtttctttatttctgcagtccatggtgcattttcaatggctgtcgcacaagccgcataggtgtcgaattgcctctttcctagctcatcaaccgcattaaaagtcggacgatggctatcgggccattcagagcttggaacctctccgcggaattcaattctatacttccgtttgagtctttcgacctgcttccgttctttggatgtgaatggcatgggtaaagtgtaggcctgagacttgaaaagtgaaagagtatagctatgggcatcccgacagttgtctagatataaatactaatatatagtccaacactgacgtatgtggaaactcgcaggcgaaacttcatcttcgcggcccccaatcctagtttcaaggaggtaatgaactaatattactgttgtagctgccctacagcgtagggagagtcgggatcagcgggcagctccgggccgttcatctaggtagcgatcgccatggggtcaaactgctggatttgagtttcggggaaattaatctagttcattctctgcccaaagctctaagtaaagatctagccagaagaaattacgtgctagataagctagagtagactgagtactcctttggaatcatggaaggctctttttctccaccagtcctctatgctcttagaaagcttcttcaaaatgtcccacactttcagtcttcttaagactccactcactttggtatccatatcacgcgacaatgctgactacgttctatagtttgtacagtgccgccgccaagtgcgacggggcccaaaaatatttcaagtactatgcgtgaactagacccggggctgtactgaccaacccatgtaaccctcagatcggttgagctagacttattgtactgggtgatcagcaactggttctttgtgcgccgtggcttaggtctgttcctgtgaagcgagtagaaaatcaatagccaaatcctcatctcgccatcccctttaagccagaaggtagtgtgccctcaactgtattccagtggcgcaagattatgcgctggtcttagcttgaaataacccgccaatgaggtctacatttgaccactgatgggactggaaagttcgccagtcggcctttctcaatcaaggatactaacgcaccttgtagtgctacccataaggaaattgaaaacgaatcaacaaatatgagctgctacccacaatatctaaaacttcattttcgtaggttgttagagaggaatggcccgggcaacaaccaaagtatgatgaaacaccagcgcagaaggtgaaactaccccaacattagtgtggttacatcgcatattagttccgtttcccgaaataccaaattcctctgattaacggatatatatagctttctaacctgtctaaataacagggtaaatattacacaaattatgcgtactggcgatatccactgatgtcttcattaatctttgaaaagtctctccaatgtcgacctcatggtttatgcgggtcccaaccacctatagggtctttttgcagtcagaatctcacgctcgggaagaaagactggcttcttcgtccgaaggcttcctcttcaatcccatggcgaggtgaaattgagacggaaatcaatttagcttatacttcacaatctacacttatgccgatatctttgtcagggttgtgagaaaagatatccttacaaagaatagagataattttgtgatatgtatcaaattcatagagaatggattagtagatgccttcattgattttttcttctggtaccggaatttccagtatcaacggcggagggatatatgaaagactaaaagcctagtcattagtacgagttttgtgccaacgcatacttgcattcttcggcgcatgcgtgtgacgaagcaataagagccgtcatataccatggtgattaggtacccatatatcaaagcacgacggcagatggagcggggttttgtttgatgggagctagataccaccttccttggactatgcgagagttctaattcggactccaaagaatcgctggattcaataaaatacttagacaacgagaacccgctgacaaagtacagctttatcttgtgaggattttggcctctgttcagcggaccatagccgaagactggctcattggttcccgaaaatgcaagaatcattctacgtggtatttcgagattggtcagacaggtgtacaggtggcagcaatcaagtaagctttactatcggaggcaccatgatggcaagcctctcgaacgttgtttgctttttttcggtggtctatatctactctctatcccccccttccatttttctcttcttgcccaccctcatagcgaaccttttcttgccgtcataatttgtgaaaatactggatttctgacgataaaagccagctatcgcactcttcaaactacccctaccagcttctatccgatcttttgactttaacacgcatccttcatcaaggtcaaaagaatatcttgatcgtttcattcttccagctgctctacatgccacataagatggttccagctaaaaataagaagcccatagccaaatggtctatgtatccagctcttcacgacgaggtatcaacattgttggtcgaggaaaatcttcatttcaaattccatgaggatgacaatgacgcaaggcgcatcagagatcatgatacaaacataatgggtcgctttgtatgccataacccaggatgcaaatccaaaggatggtcaagcaaaatgatcgccgtcacaattcgtctatacccagggcaagaatataatgcgagggtataccaccaacactgtaaaacatgcagttgggtcagtcgaccagtgctggaccagtcatacgccgagagaattgtctaccggatcaaaaaatggaacggagtgccagtagagacgatttcgaattccggcagcagcagaggtcctcacaacagaaaactttgtgaggggtgcaaagccggacactgttcccaatcaagggagaatgcaggggtggattttattgcacaactagaaaggtttgtcagtctcaaatcgactaacactatttgatactcgtactgacatatgcttagattgactctctaacggaccagagatccaagtgggatatagaaaatcataatcacggagaacaacctttcatatatctgatccacctttgagaaattagggcaaggtgtcaaatggaatactatgggacaaagtcaccttcagtgcttattctctgttatgaaaaccttcaataggcctataaatcccagcaccactttgcaatatcttgctatttttgtagacccatatatatattcctgcaaggctttcaaagagcaaggtgtccttcgcaatgagcgaaaaacaggatcgacgggtttggcacgaaccacgatcttgaggactaggacccataattcgagccataaagtaaccaattactagggttcttgcgtggctgtgtgcagatgccaagatgccggccgtttcagctgagtatcgtggcccaattatgttgtactcttgctcggctgtcagttagtacatactgtattgtatgtagttcgggatgggtgactgcgaaggtgtatagcggccagtggccgaatgcctaatgttgcagagctgatgccttaaatgcctgatttatgccgcctataactactgtgttttgtaaacggaaggcactattgtcttaggggctaatcctgataaggcagtgtacctcttggcactctatttccagtatgcatggcgttaattatagtctcgctacctcttatagcagtggtatcggcccctcccgtagtagtcgaatcgcgagcttattcttaggaaacttcgctacgctagagctaggccgggggaagatagtggataaggttagaggaagagtaagaatactcgaattggagggagatggaggtttgtatagtaagaacaactttaagatcaggaaataaataaataaacaaatatatacggtcggaatatcttcaaactaccaagacttaggcgaacagagacttacatagtaggaatagctttattttagatgctctctgtcgttgtaatccaggtatttgccagtataaaatcaggcaaaatcaggcattcgaccgctggccgctatacaccttcgcagctcctcgtgtaacgaaccaaattacatggccatcccatacagcatgccatcattgccacttttcactcagtcttttcacgtctttgaccgttcggaaccttctcattactctgccaggtgaccaccagcgaatccatcctcactgatgtatgtttttgtctttttttttgatttgttaggaaatcccctcttgccgccctggtacatttggattgcccctaactactttaggtagcttgtggattagttctgccgaagttctgatacgctaaagaacaacgcgtgtcggtagcatttctcttctctatactagatatatgtagccctatagattataaggcgctttttctataggaataagagcggagggaagttagcggaagaggaagggagataggaaatttcactttggttcttccgccattccacaatgtattatcgcgacatctttcaatcattgtcacgccttcaccttcaaattttcggtttcttcactcatctctgatcagctttttctctttctttttgcactcttgtcatcaaatcttcacaccaacatgtctatcatgggatattcagataattgcctaggcacacaagtgaccttcaccactccctcgcctcagcagtgggttctcgaggagaaactcaccgaggatttctaaagcattaccaaccgtgaatttgagctgggtggtggaccttccttcgctgtgtcaaagtacctctgctacagtgcgacagatagtagcaagaaggcattcatgagaatttactttcagattcctaaccccggaatagagtcccagctcccccagcttcgatgataataggcagctccaccccgtcagcatttggagctaaaagctcgaaggatctcagtgaataacactgtactatggtcccagctctcctcgcccacaaagaaggaaagcaaggcaaggacggcgtggctctagacggctatataacacatattgtatgggaaatggtccgtaggaagccacttgatacagatcagttctagaggcctgaatcggcgcatttatacaaggccgttcgcacgaagttccgccgtatctaggagtatgtttacagaatccccattagcgtgttaagagtgaaactgacaaacctaagagagttgaagcatcatggatggcatccatagctccctcttttgcagaatattatatacgagtcaaccggaggtatgtatgtgatatacgatatgcacctattatgaaacagaatatgcttactgtctttaggcacattgcaggtttccgagaccccgaccgcttcgatctcgacgaggaattttccgacatgacctttgtcctctggcgttcaactaggccaccaagaaagtccggttgggagaaagaccctaccaagtgggcctgataatcatcatggatgcccgtttccccagctcaaatgtgttgcgccaatgaatcgaatttttgccgcaattacaggaatcgaagttgatatcgaatgacagcgtaagacttccaatttgctaactaattgtccgcattatcgggccgaccacagtagttgctcttttttcttgggcaaggcggaatgctttttgcaaatcatcaaagttcccagtttaggcggccacaatatgatacaagatcatgcctccgcgattggaacttctatggtttccgcttgtgggtcgcgtgtggatatgtcggtgcagatatgtatgttgtatggagttgaaaggaagcgggggaatttctactccgtaggtgacggtcagctaccgaacaatggtacttgtagtatcgggaataattgccaggcaatctccaagagccacaatatccacaatgaactttttcagtagtggcaccaatagtcacatgaactggcgtcaatagtagcaaggtcaacccgatcgataaacctgcaaatactaggctctaacaaatccactggggaaattgagggaagtcggtcttcagtttgttgtctcttagaaaagcctcggcacaccaggcacgtgataaggggtaaattgttgcctggtttgtcaggcgagcaaatccttgcacgtgtttacttctcctattatctatcatgggccctcttagagatttccctcaatctattgggcataccaattagattaatatcgtttttcggcccgaattggtagaattccgatgtcatatggccagtgatcactattattgtcggcttctatcactcttctttcttttcatgctacctatacgtcttttcaaggcgaagaaatatacatttcatcaaaagtataagcaatcacatgcgcaaattaactaatttaactacattccccggaaacccaactgatctatcacgtttgtacacgtgcacactaagccaggtcggccaataaatctcctccgatatataaccacccgttgccgaaagttggtcgatctccgaattttcgctctctattactccgcatatctacactaatcctacaacgctgtgggttaaggtgacaatgcataataacgatctgcagagtgagcgacgtgcagacatgattggccctaattgcattctatcgtatgcaaatatgttatgcttgtggtgtctgcgccgagacacgaaagtatatatagagctaaatcatataatctttgtgatgtagttttgagacttcagattctgggactcatttataacaacattattcggtcatggggggaattctatcgctcaaattgctgccctttgtggctagctgcgcctttgctggtgtcaattatcctgagatcccgaaggacttgactacaccattccagcaacgattgacagtctatggacctaatggtaagaagaccggtagatatagtgggcttggagaggactgacttattcatctttagctgtgtcggttggttggaacacctatgaacagctgaatcaaagttgtgtgaattatggcttgtcagaaaccaacctgaataccaaagcttgctcatcctcgtcgactacctacgatccttcccggacgtggtcaaatgttgcagtcctaacaggcctgacccccgcgacaacctactactacaagattgactccaccaactcgaccataggccattttctcagccctcgcacgcccggcgatagaactgcattcaccatggacgtgatcattgatcttggtgtctacggcaaagacggcttcacaagcaaaagaagcacaaaaaaggacactattccagtcatcgagccagaattgaaccacaccacaattggtcgcctcgcggaaacaatagacgactacgagcttgtcatccacccaggcgatttcgcttacgccgacgactggtatcttaaattcgcaaacctgctcgacggcaaagaagcctacgagtctattatcgaacaattctacgaccaactagcaccgatcgcaggccgcaagctctacatggccagcccgggaaaccacgaagcagactgctcagagattccatacttgaacggcctctgcccaaaaggccagaacaacttcaccgagttcatgcaccggtacgagaaaaccatgccgcagtcttttatttcgtcgtcaccaaacccaacggcccaaaccctggcccgaacggcccgcagcctttccaacccacccttttggtattccttcgaatacggcatggcccacgttgtgatgatcgacaccgaaacggatttcccaaatgcaccaagcggccaaggtggctccgccaagctgaacggcgggccatttggcactgcgaaccaacagatcgagttcctcaaggccgatctcgcttccgtcgaccggtctgtcacaccttggctaatcgtcgccggacacaggccatggtactcaaccggaggatcgtcgaacgtctgcagtccctgccaagaggcgtttgagggcctgctttaccagtacggcgttgacatcggtatttttgggcatgtgcacaactcgcagcggttcatgcctgtggtcaatggtaccgccgatcccaacggtatggaggaacccaaggcccccatgtatatcgttgctggaggccccggtaatgttgagggtctgagctctgttggcagtaagcctgcttatacggagtttgcatatgcggatgactatagctacagtacgcttaggtttttggatgagcaacacttgcaagttgattttgtgaggtcctctactggagagatcttggattctagtactttgtacaaggaacatgcaacggattttgtggaccagtaatggaagtttggggataatagaggctatttagttatgacatagggcgtgggacgatgtgatagtgaaatagaatgtgaatttctgtttacagggctttttagcacaagaaagtgtgaagacctagtaatgtagggaagaaaaagagtgtcattctataagaaaattactatataaagaaagaaataaagaaagagagccccaatatttccaatgccatctaatatgcacaatcatccatcccatcaattatttacatacgccttgcctcatatgaccatatatgcatcaaggatctaatgtaaccaattataaaagtacagcccatgtcgtatatgtggctctcatcgatgcgatagctgactattccactccttcgggggcgtcgtcgaacaacccgccccagatggcccctggaagccccagggctcactatgcacgacagtctcggagacaactgtgatatccttggaggaaggctcagatggagcgaggatatgctcatcgctgccccacgcggaggtctgcatatgcgttggcgcggcagcgttcgttttactctttttggtgtcgccttcgccgcgggttgtcaagctctttaaacctcgactggagagctggtatggctgtcccgacgttttacccgaggaactgaagacgtgggagagaccaatcttcctgaagcccttgcggataagtggttgaatgatgggcaggttagagacaacgattgagacgaaagtttcacgacaggcccatttggagccggtttcagcgccgtcggggctggactatagtgcatatgtcagatatatgcgtaaatcacaggtgtgtgtgtttctgcgtgggaatcctattattgcatgggacgtaccttcataattgtaaccgcccgaataattcccgctatcatgacgaatgtagcgccggaaaagagagccataagagggatctttcgtttcagattgatgttgacagtccaaagaagaggcagggggattgagagaaggtagatgtccgtggtaatgttgagtatcacgatgacgaaaacataaacgggggagttggctggctgacagaattctgtaaatatatcaaggtaagaagactatggattatatctgattgtggtgtaactcactgccggggtcggggtagatctgccaaaatgcatggaagggctgacatgacagtaggatcgacaacgctgctgcgaggtatgtcacaattagaaggacataccccagtcgaactctggtaggaagatgttggagaccagtcctgtgatatgcttagcgcattggttcgttatatccaaggtggtatgtgaagcgcacgtcaatcgagagtagaagactgccaagctgaatttaaccagccagagaatagccgtgtaaaatgaccatccaacaatttgggtcttggagccagcaacacggtgagcccattcagtcgaattggggtcaagagctgctcgagcttcagacgtcatgtaactgttagtaaggccctggtatttggcaccgacgaggtatgctgctactgtttcaagtacgaacaggatctgtcaaaaagcattatgttaattataacttctttcaatggtgtttacaggacaggtgaagcaacttactcccgccaatggcatgagataatcatcaagttggaaatcggccggtccgacgagcttccatcgtaccccgacacggactaatattatgatcaaagccaaggacaacaaagtccatgcttcgacgttaccggccattcttgcgagtcgtcagttgtcagcaaaccaaaggacaaaataacggaagatgaaagcgggagttggagagaattataaagaaaggccccagccagaccgacccgcttagaatctccagaatatacggagtcgggatttacactataaacttgtgcgactagcttgccaggctaatcgcatagtgcgaatagcctacccctggaggatcatccatgtaaattgtgtaattttgtaaatttgtgtcgtcccaccggctccataaaatccaccccgctaagaggggtagatctgtaattggtgcgtggccgacggtccgtgagtccgacacgggcgggaggctgatacgaggggattacgaaattgaggattacgcaccagggatgcgtagaaaattacaaggctatgcaagccggcaaactgacacttgcctgtgatataaattaataagattcggacgtagaagccgaaaggggaagttgaactcaaaaagtataccccagccctgccttgaggtcccgtatggagccgatcaaactcaaatcttggtggggcggtggggctccgtaaggtcgagccataatgtcccgacccacggctcagccttcggaaagatttcggaacccgttacacgcgctgtggggatatccgtggtgacgagccaactaccaagggtatcattggccaattcatgaaacagcttgtccaggtgatatagggcttcaagaattccttaaataaccacattgggaataggcccccctctccccctattgtcctccgctgttctccgaaatcacgtatttattcttcgtttcctcccaataattgaacacaaatttccaaatttccaaattttggtacttacgttttggtgatttccacggttcactcccagttgatatccacatcgtttcacaaagtgcaatatgtccacctttgactttatcatcgtcgggagtgagtgatcttcattatgccctaacttcgttagcccttatccctaatccgtcttgcaggtggtccgtccggctgcgccctcgccgccggcctcgctaattccaccgcaagaccccgtgtcctcctcatcgaagcaggtgacaacaaagatgatcgcaaccttcgcgtcgacggccagcgatggctgaccttccaggaccagtcaatgaactggggattcaagactgctccgcaggcggactgcaacaaccgtgagatcgactatagtcgcggcctgtgcatgggcgggtcaagctccatcaatttcggcgtgtacactatcggcgcacgcgatgattaccaggagtgggcgagaattgttggcgatgacgcttttgcgtggacaggtgtgcagcaaaagttcaaggatctggagacattccatggtgagattccggagggcatagatagaaaatacgtggctccgaagacggagaatcatggaggcgagggcccgttgcatgtgggctttgcgcgggagtgggaacgggatttaacagacctcttggatgtcttcgagcaggctggatttccattgaacccagatcataattccggaaatccgattgggatgtcggtgctgattagctcggcgcataagggcttgcgctcgacagcgggggatctggtcaaggagagactggataatttgacaattgttactggagcccctgtgcagcgtgtcctcctcgaggggaaaaaggctgtgggcgttgaatcaaacggaaataaatgtgaaaacctaccttcgctgcgagtgacccagatattaataattatgaacagatttcgccacaaaggaagtcattctatccgccggctcgctgaacgaccctcgtatcctgatgcactcaggcataggccccgccgcccaactccagcaatacaaaatccccgtcgtccacgatgcacccgctattggtcaggggcttcgcgaccattgcttcgtcccgatggtaaacactcgtacagaaaccagcacagaccgaaaggccttttatggcgatgaagccgcaatggaagtcgcacagaagcaatgggaagaagacggaacaggaccttgggcgaaatttgcctgcgagttgggcattggctggttcaagttgaccgagcagctcacttcctcgccggaattcaaggccctccctgcagacgaacaaaagtatcttctacaggagaccgtgccgcactacgaggtcctcacccattttcccgttcattgggtcatcccagatttcccggatgaggcgttgaattactcctgtctacttgtcttcttgttcaatgcgcagactcgcggagaagtcacattgcagtcgtcagatcccgactctccgctctctttcaaccccaagttcctggcccacccattcgatcgccgactcgcgatcgaggccttgcgcgactcattccgtgtcgccaagcacgaatcctataccaaggacaacgtggctgagctggcaatgcccaagggtgagtcagacgaggatttgctcgagtactggcggcagaatatttcgtcgagctggcacatgacaggaacagtgaagatgggcatgaaggatgacgtgaacgcggtcgtggatccggatttcaaggtgataggtattgagaatttgcgtgtcgcggatatgtcggttgtgccggtgttggtaaatgcgcatgtgcaggccgttgcgtatgtcactggtgcaatttgtgcagagaagttggcgagggagtataacctttatttggatcaaaagcacctagcagtgtgagtaggctctaacgcaatgcaaattgcgtattctagttatgtggtgttcttatataaacggtacatataattgacattgtttttcctcgatcctcagaatagttagggaatagttacatagaaatacacgtataatatgactaattgttatcaggggatcacgtagcatgttgatcaactccgttcgatgtcattgaaggaactattttccttcaataatctatgctacccacttttacggcaatacgaaggtacatatattataaatagtagtattttgagtttaatgtagatttctgtgccgttaaacttaaagataagtataattataaccctattgttgtaatatatagtggggcgccttaaatacataccagatcataccgtgggagatacatagcagaagatcgatcagataagtttgcgacatagcttttgtttggatcgttctctctgtcatttcttctcttcttcttccttttttctctggctttaatctttgagtcaaatggactctttccatcgatattagatctgccttgtgacagtacctaggtattgtatgtcgtggccccgatgatcattaccaatcctgtaaggaggaagtctaggcatttgcctatcatgcccgtaaaatcgaaggatcgtcggagagcagacgctttaaaacccaaggaggtttgaaactcgtaagacgtagtgcatttagagtggtataatatgccatttttgcattataaccctgcacaattatacatagaaagatctgccctatggtttactactctagctacgaaacctgaaaggggaaagcttatctggaaaaagacatcaaaaatactactaaaaagacatcacgaggccgcataagcgaccgactattgtaatccgacatcaatccacctggttcaaaattatcgagcatcttgactttcttgatattgtggttcccatcgaggcgcttcaatctatgtgtcaaaattgatccgtgcacgaatatcataaaattcatggaaatgatccacatccttgagtcttcgtccctcttcgcatcttgactattcttctcctctcaaacccccaaggcatgaggcattggaaagaaattattatgagatgtcaatatgggaggacataaccagtaggccctaagccgcaacatcaaattattatattacaaccttcgaaccttttcattgtatatctcgcgttagtcctatagtatttcattaactttggttttgcctgttgatcaggaaagaactacgtagcaattgataatctatattggtgccctccctttttatccaggaataagaattttcatgaaagttaaatttctttctttcgattctaaaccatcaatgactatccaaaaccaatctcaagtcgaaagtatgatacagtacatcatgccaagactgaaacctataccggggcggacgctgactccttagtctccttctcccgtccccgaattttgcgtcgctcgacgatcacagcaccaataattttaatgcaacacaaagccaatggcaacagccacatatccaccattgccttattgaaagcgtctaggacggcgatcttgtctgccccgtgtaacccgttggtcagagtcatgacacctccggtcatgatttgactagtgtcgatactggggatatctgttttggcaatgttttggtctaggtggttgatgaagagggattgagcaacgccagtaaagattgcactatcaataacatggcagtaatttatggctttatcattttccccttccggtaggatagattctagcaacacaataccccgacccaataagaatatccaccaaatcaagcacattctgggcgaccataaccggcgtttgagcacatacacccatgccaaggccgaagagaatttggtacccaatccattttcccgtgccgatgtcgatcgtgaatgtggtgaacagacctgccccgagggaaataaatttcgaaccaaaaatgaggaatggccaaatgcggtccgattagaataccaccaagcagcgaggatagggcattggcaatgcccagaggaagggtgtccacaccagcgccgaagggactcgtccctggagctccttggaaccaactgtagattcattagcgagtcggctctgtcgcgtcatgcaagacatggaatgtaatggaataagacatacattggaatgtaatagagcagcaagaacgaggcaccatccattcgaatatatcggtacttatagagttagtagagaattttcattgccaggaaggtgccgcttactgggaacccaaatctcatctctttacgcagattgtgtgtgctccgtggcatcaaacctggctgtcgcgaatgtgtacttatacattgtacgcttggtaaagaccgtactgggatggtttttgcactcttatttctccttgctggggtgtccgataccgttatcgccagcgagtacggcctcagcacagaaggccttgcagggtgtgttgacagcattgagagctatttgaatcatgctaccgaaaatcgtgatgacgcaaggaaaaagccgaagagatcattgttgccaagtctgtttctccatatttgtgaatttgatcagtcatctgactcgaaatctagagaagagaacatgattgcgagaattaagggcattcgggacgagtatggcacggcagaaaactattttctgcgggaacgcggcctttctgacgaagatctgcgatgctccagatcaattttactagcaggcgacgacttgaacattccaacagctaaagggggaagaagtcaacagtcggcattcacgtgaatgcaggaagcgacattgcgtaggctgctgccgatatggtgttaacgagagcaaataagtagatgtgaactgattcagcagagttacatagaatatgtttctatttgataaaggatctattaaaaatacatgataatgcatgccttcacatatccatccacaataattacaaacctccgaattccgaaaatgtacgaagacacccaaattaattaggaactggcctcaagctcactcagaatctcatcagcggccttctcggcgaccatgtaagtagaaagcgcggtgaaagtaccggggactttggggtaaacggaagcatcaacgacacgaagaccagagacaccgcggacacggaatttggagtccaagacagccatcgcgtcatcatcagcaccaatggggcaagtgcaggatgcatggtgaccccaagtaccatccttgatgtaatcgatgatgtcttccttggattggacatcagggccagggagaacctcagtgatgttgacggcctggcgcttgaacgcgtcacgggcaagctggacagcttcgtacatagcagtgagatcagcctcgtagtcgccgacaccagtgtcgaagtagttgaaggtgatcttaggcatgtcaagaggatcagcggactgcagaacgacggttccggcagagttgcgggggtgagacttgagaatagcccaggtaaaccagttgtgttcgtcagtcgcattgatactgtagtcggggaagtagccacggaagttaacagggccaccgaattcgaaaatgtcgaagtcatcagtggccgtggagctcttgtatagcatggtggcggcgagaccgggggatgagtaaattccgtggtcgccaagaacaggagactcccaatcactgatgcaagggtccgcctggtcgcgaatgctgaaggtgcacgtgtccaagcaggagaagtcctcctcgacctggccctgaacggagatctcatagtggtcctggaggttggtgccgacaccggggagatccttgatgaccttgataccgaacttctcgagttcctcggcgggtccgataccactcagcttgaggatctggggagagttgtatactccaccggcaacgatgacttcacgagaagcggtggcggaaccgggggtaccagaaacagcggagttcgacagaggactggccctgtagaggtgctcgccatcgaggaactccacaccggtggcacggggtggggtttcggtctcattgaaggtcaccttggtgacgtgggtgttcatgcggacatcaagagggtacttcttagagccatcgtcattcgtagcatcgcgtacagagatgatgaattcacgggcaccattgcggtgagcgtcgtcggtggagatagggatctggtagtaaccgggctcggtgtcacgggtctccgtgtcagcattggcatcgccaactagcagagtgccaaggttcataacttgatcggtcgtgttaccgagcgcaaaggcaccaccggtgagcaagctcagcaactgggtatcctctaagacaatgctgaggggcgcggtttcggtcgacaaccagccgtcgtaaccgtggccctcaactgcgggaagagagtaaccgttgttctccagcttagtgaagtacttgcgcatattgtcgggtgcccaagagctatcgttggtgatagtctgaatgtattcaaagtcagactggtaaggatagactgcaatcaaagcgttgtgggcagtgcaaccaccgagggtacctgtacgagggtagagggttcccttcaaggtcgagccctcgggagggttgaggccagtgtatatcccgccatcgggcgtatcatagctagtcttccaatcgcgagcctgacgctcgtcatcttcgtagtggtggacgaaaaagttccacgaaagcttctcgtcttcggaggctctggcggagtaggcagggatggtgtagttgtaggtttcaccctggtcatcaccagcctcaatgagcagtgtcttgtgaccagccaaagcaagtcgggctgccagaggaccaccaccagcaccggaaccgacaatgacatattcataaccggtgagttccacagccttggccacgccggacgtggcgaccagcaggccaaagatataagcaagaatcatattgacaaagaaggactttgagtgacttgaccttgcagaagagatatcacccagcttttatgcatggggtttcccctgaacaacggggatggttcacgtcgttctccatttttatcaaagccgttgaatacttggcgtgcctcggtctccactagctcatggtgatctacacggagacagctgagcctagtacttttctaggacaattcccgaacgatcatcagtagtttaatgcgtaaaccttacatcgatgcagatcatcaagacggatccacatgtttcgggggtttctcctttccagaacgaagcatcactagcagttcgctattgccgagacagtgcggataatttttctcaaagctgagacattttaatccctgccatctggatgctcaataccatgttaatccatgtcatttggaggctcaatatgttaagtggcaggctttcatcaaaagggggaagtcaattcaagattctatacgaggtagatcagagagaggagcaggcacccaaaatggcaaaagagggaaaaccccacatctgcaaagaatgcaaacatcgagtgataatcctctgccgaggcagatgacaagacatgctctaccgagtccaccttggccaaccccaccaggactaagaaatggccgccaaaagctcgttaggccatgcatgttcgctcgtattattccgaagaagaccggtttgatcaacggagaaagaaagcagagtatctgacataggcttgcgcctgtactccgtactgtgcggaaagagagcgtaggcggtgtggtcatcggaggccttagctacttccggctagatcaatatgactgtcgctccgcaaatgttgaagggtcaattattgcgaaaaaaggatcgactgtcaactgtgggatgtattgaatcgacagtaatgggagtgatcccccggaagatgtgcgtgatatgcacataaaaagatgtccaaagatgcgacaagcatgaccaaacggcgttcggtgcccaggaagaaagggaattgccttccttagccagcgacactgcttacgctggcggtcggtaggatcgctgacactacggagtagacccgcagttatttaatggcaaacttagtggggaaaagaagatcagaacgatgaatatgggtaaaaggagatttatctcgccaaaggcagacctcaggcagttacagaaattcatcatgaactgaaggggtggaagcgtatttagaaacactttcgtcttagttttgaggcaagctttacgtcaatcacctgatcaaataataggtatcaatgacgtagggaaggatgtagtctgctctatctactatgggatgtaggatactgtaagggggaaggagactggagaagaatatgagcttgcgttggcttcaccaaaaggctactagtcaacagcaccacggagaggtccaagctcgtggctgttggatcccctgggagcatactgctgtcccaggagaccccggtcttcccagaagacctagcagaatctgggttggcatctgatcggctgcgtgtcgaggtggtcggcactgcagactcacgtctagcagaatctgggttggcatctgatcggctgcgtgtcgaggtggtcggcactgcagactcacgtctagcagaatctgggttggcatctgatcggctgcgtgtcgaggtggtcggcactgcagactcacgtctagcagaatctgggttggcatctgatcggctgcgtgtcgaggtggtcggcactgcagactcacgtctagcagaatctgggttggcatctgatcggctgcgtgtcgaggtggtcggcactgcagactcacgtctagcagaatctgggttggcatctgatcggctgcgtgtcgaggtggtcggcactgcagactcacgtctagcagaatctgggttggcatctgatcggctgcgtgtcgaggtggtcggcactgcggactcacgtctagcagaatctgggctggcgtctggtcggcaggatggttgtaggaagaagaaaagggagaaaagaagggggggaagagcgccccttatatattggcttgcggcctcaggtagcactcgtggaccaaggatagaaaacggaagatttgagtttcaccttcccaaaacgtactagtagctactttattgaaggttaaatccactgcaactacggagtagtagttagggtttactatcggagctgtacactttagagggttgctctggctctattacttttgtttgggaataaattcactcataatactggaggtctatagctgtaccataatttgaagattcagtcatcaatactagaagaaaagaagaaacaacgttgggtactgagatttgttcataaccaccctgtaatatgtgggtacagtgttgcctcactttccttggagatatactgttctactccccggcttcagtggccatgtcctgcggtccccatccacttggtcaataatcggagtggatcattagttggagttaaatctacttctaggctttgatttatgttttactgcaaacctacttcatgcatttgatggtgttccatattcccatacggagtcggacacacgttgacaagttggcaattcgctcgtacaacatagagtccgagtggcgcaacaccgcaatgattggattcgaccgtgtctgcctcgatattcgagatatatgaggtcacacgtggaagatggacacatcgctcgaagtctagagcaacatcggaaccttggaagctcccctatgggtaaccatccggatgacttgctggtcttggaacgaattattttgctacattgactacgcaggtaaattccccgacggcagatatggaccggtctgctagatttaatttgtaaaagaaatagatagttggaaggcatcgctatcctacttccaaattttctcccccgcaaccaaatcaaagctccgctcgtctggatgctttttcttttctttttaatactggtggtgttaatgagagaaagcaaattattgatatgtcaggatctcaacctaactgtacccccgcgtgcaaacttttttgctctttggttctcagatatcgaggccctttgaaagtgtaaggtaaaaaagcccgtggccgaatccaggcacgggttatcctggggctaatgcctcgggcagaccgtcaagcctaaataaagtaagacatgcccttctccactttccttctctcctccagccagtttcatcaagcattttcaacaacactttcttttcaatatggaacctcttgatgaccagaacattttttccgagttcgaagatgaggagagaaggcagctcatcgaggagctgatacgtcaggaccctagactagcggaactcccgcgtacgaacttttttactctttggttctcggatattgaagtccttcgggtgtttgccaacgtgcttcagaggggtgatcccaatttcaaatggcgaaaatatcttttgtccacccccgacccaagtgatgtacctggagtctgtaagtgcatcatcgtgcatcagaaaatgcctctgtggtaacaagacaataagctaaaaattgatatacaaaacagtcgcatcaagtaagcaggccaataagtcgtcctcgaaaggcaaatcttcctccgggtctagattgcctgtaccagctcaaagccccgcgggcaggactcgctccacgtctcctcgaaagggccagccgggtctccgcgagcgttcgattaacacgccacgtacttcttgggatgaccagcaaaaccccctcggtgaatcgtcaacttccgttcagcaaagcccctcccttggtcaggatttgactttggttcatccagaaagacaaaggcgagacgacgctatgaagaagaagatactctgatcgagaacattgagacaggataatgctaacttccttgccctttagtgcctggagcgagatagtaacaggtgcatcataaccaagcgcgatcaccccgggattcagtgtgcccatatcattccctacaaattgaacggttccagcacccggggtgcaacctgggaatggctcgaaaatttctggggtgaggctcgcgccgacaggtggaaggctgagctcctcggtggctcaaatcaccagatcaataccgaacaggtcaagaacataactactgggataattgcctgtatgctttccgccacttgagaacttacgagcaggacacgaaagtggacattgcgttccattggttgcctcttcgcgggagtgagaagcgaaccgacattatccccactatgtcccatccattccctaatcaaccccaaggatatgccacatctccaggtggcaacagatagttgttgcattgtgaatctttgaaccttatctcccccggacacattttcactgtgacaaccacaaacccagtgactcatccacttccatcggaggagttattgaaaatgcaatggatcctgagtcgcatcgctagtagctggtgaagacgaggacagcgaccttgactccgatgatgattccgtcgcttttacttcccgctcgagatctccgaacccactgagcaattgaagctcagagcaaggagctcgtatactctctgagaacatgcctttcattaaagccactagttagttaccgagtatgttgactaagagctttcctcgttccatcgcccaagttgaaagtatggctagataacgcatttctcacgtcaatatcggtcatccaccaagactgtggtctttagaactactcctgttgaaggagaaaggaaaagtggagtgagagtgagagtgaagtgaaagtgagagagaaacgagagatgtctagttagagcgaaatagcagtccacaaaacacggttgtttatgagcccggtgcattaggtctaccttaataatatgcgaaagatgacagtaaaaaacgtgatggtaagattggaagagctagtatttcaagagaagctacacgaatgagcttgcgttggctttaccggaaaggctactagtcaatagcaccgcatagaggtccaagctcgtggctattggatcttctgcccagggatatgacacatctccaggtggcaacagatatctcttgcattacgaaacgctgacctgaaacttgtatcctccaggcaaactttcaccgtgacaaccacagacccagtgactcgtccacttccaacagaggaatggttggaaatttaggacagcgactttgactcctacgataataccgtagccgttacttctggctcaatatctccaaccaaggaggcactaacatgacttgcttcggggaacgaccgacctttgcaccctctcgatgaaacacaactgaccaaaacatggctaaaccagatgccgatcgtgaggcaatgccacccgctcaaatttcccctggacaattgaacctcgggtctccaataggatccccgagcaagggacccctgctgctctgtccatatcctccttacaactttcaactgcggcgctataggtctaattttgccctccttggcgctatgctaggactccaccgccgcggaatggacgaccaccgtaaactcggtcagatggccgtgaagaagcatgggacgtttgtctcctctccacccgcccgaccgaaactcaaatcggccgtcgtaagaagaccctaaaacccgcgcctctgaagcaccgacgccgtacctctgactcgcaatgatatgtcccctttcccttttgctgttttgcactcgttttctgctctggtccgtctgaacccgcatatccacctatttggtatttggcacttgagcttgtacaacttatgctgtgagacgggatctagttgaaaatataaaaagagcctctagtcccaattttctattctatcttattcgcagtatttattagtagtgtaaataattgacttatttatatgcacctgtatttctatgattctgtgaaactcctccgtcgtgacaaggacatcggattcttcttgtgccaggactctatcgtacagagtatggaattgtaagacaagaagatctccggcaattgcttgctgtgcgatgttgatttcctgggcacaatatggctgctggaaagtaggaatctgagggtatagcagcctgcttatttgatgcgactgctttgtatgtcaattgtcagcttgttatcatattgtcacggaggcacttgctgatgcacgatgtacttacagattccaggtatatcacccctctggagcacgcttgtaagttgccgcaggacttcgatatctgagacccaaagagggaaaaagcttgaacgcgggatttcagcgagactgaggtcctggcatatcaactccttaatgagcttcttcttctcctcctcttcaaactcggaaaactgttcttatcatcacctccatattgaaaaggataccaagtgatcttcctgaaacggatgaaaagggaaagtggagaatagcgggtcttgcctcagccttcacgtctgcctgaggcatccgccccacaaaaaccgttgcctggattcgaccacggacatgatctcctacttaacccgacgcccaacctatcagcgcatatggttgtgtagttagttctttgttttcgtgctatttgggctctcagccctcttatactcaacaaatagaactctgttgatcatgttctggatatccgtagggacaatgttggcacgagcccgcgagggttcacgtatggttctctttcgataccatagtcctcttgcagggggagatcagagcgcagaatctgagtccatgaatggtcgattctatcctcttttcatcggccagaatgaaaagattgccaagtgatcttggcgaaactgttgggagctgaaggagtggagaagagcgggtctctggctactacctgcttcgggcagggccagaacagccgatgtttctcgtatgttgtatggacttttagatatcttctttcgggtattcggaattagccgtaaaataaaacggggagaaaacagtggatggggattggcttataattcggtcctcttatcactccgagagcttgacgcttgtaatgtatataaagtaatagagaagtgagagtgagagtaagagtgaagtaagagtgaagtaagagtgagagtgagagtgagagaggaaagagggatgtacttagacgaaatgcagtccataaaacacggttgttcgtgagcccggtgcgttaggtccacctccgatataactgggaataccagtgcagcattcaggcctcggcctcatcgaccgataccgtatcttatacggagtacagccaatcataacttactcggccgtacagcgcggaatgtcacagatcataagatccaaccctaaccctatcactcgactacaggatacaacagttcatcgacgaaagcagcattggtatattgtaatttcaagaaaatagacaaaggaaatagttgatagcattagatattattacaaccctttagctggcccaacaatagtcgtagagacttggtatgacgcatagtgtgagcgcccatcttgcgactgatcattcaacgacaatccatccgccgaccctggtatttgatccagtcgcgtgagggggaattcactatcctcctcatccatgccatgcccccgttttactgtactgttcttgctcaggctggtaggtcctcctgtgaacggttgcgacgagtatccatcatgactgccaaacaaggacgggaaagcagccttgagaattggacggagcatgggcgcgcaggcatttccaatggcaagagcaggctctgtaacactccagaaggcagcccagatcatcgagtaagacagatcggtgaaatcaaccgtggtgaggacacggatacggatgatggtgatggaggaaatactatgatactcgttagaactttgctttgcgatggcgaacctggggggaggagaaagcttacaaggcacccaatccaaagatcccaaccaatcccatcttagtcgcaaccgacatattcaggttccagacaaagcgaactggcaacgccacgatgatcatatcggtgatcaggttaaaggctccaatcgtcgaaaatgccacgttctgattcgcgcagtggcccggcagagtaggattccagttcctcgcaaagggtgtgcagatcaagaaaacctgcagcatactcccaacccagtatgcggccgaaaagcctatacaggtccacgtcaggatgcggaattccctggacacaaagatccgcaagtagaaggctaggtaggagaacttcgccaggaccatggcattgtagtagacgatctggtagaccatgagcatcttagcgatcactacagcattctctgagggaatctccgtgatgtggtatcgcatccccacccgagcgtagtggtactgcattgcgagcatgccatatgtgtggaatagtcctgcaacgcagaatgcatcatcccatcctgcaccggtttttcggagtcggcgggagacaccacgcaatatcacgagtagggttgcgattgcgacgaggaccgtgttagcgatgagctgatcgcgcacgatggagaagccaaagacattgtataactgcattttcccattaactcatccgttttcggtttttggtgtgctgtacaacatgtacacttggggcatatatggttgcaaagggtgaaggatctttaagagccgtgaagaactgtcagtcgccgggtaacagcaacattgtctccgtcaattgtacaaagtactatgcactacggtttcaaactagccactcattggcctgtcaaggtgatcagcaggagattatggagccgttatggcgggccgttttattttaacccaaattaatttcccagagtggacttgcagagagaataaagtggctgtcattggaacgaatgtcaacctagttagggccaagccaaacttgtaaagactatttctcctattatgtccatgggcttcggctattaacaaataacggcctcggtacactccacccccgtacacctccttgtttctaggggcactaacttcactgaggtaaataacgtcgggaacaatttacggagtatgagctagtaacagccaccaagccgacgggatacgaaaccctagaaatgccgcgtggacttttttatctgctggcagtcgattgtccgactctcgatcttaaatatttctattattgtcatttcccctccatactggaaaaagattcaagtttttttaactagttacttacaacatggatgactacgactatatcatcatcggcgctggaatcggcggtcttgttctggcaaaccgtctaagcgaggatccctccgtcagtgtcctgctcattgaagctggcgccaatcggatgggagatccgcgtattgatacgcctggattgatggctaccatgtatggtaacccggactttgactgggattacatgagtattccgcaggtatgcccgtcttaaacatcgccttctcggatgaaaacctgattaatgaaaaggtccatgtgaaaaaccgacagatcggtcagccccgcggtcgggtcgtcggcggctcttccgcattgaacttttccgctattgtgtaccctgccgcgtcgaattttgacgcgtggaaggcgctaggaaatgacggttggagtgccaaggatatggccccctatcttcgaaagttccactcgtatgtcgcccctagcgaggccactgccgaactactcggcacaagccggtacatgcaactcgagaaccaaggatcgaatggtcctcttcctgtaacttacccagatatatatgggccattccacaaggcctggaatgagacatttgcgcaattgggctgggaaaccgatgccgaccctattgatggccacaaactcggcgcttttacttccccgataagcgtcgatgtcaagacgggtaaaagagggtatgcagcggcatactactcccccgaggtcgcggcgcggccaaacctacggcttcttgcagagacaatggtcgagcgaattatcctctcccaacaggagggagatgtcgttgccactggtgtgcaggtcaagactcaggacagttcatacgagatcaaggcaaagaaggaagtgatcgtctgcgcaggcagcctgaattcccctcaggtgctcgagctctcgggtatcggcggtgcagatcttctccagacccacggcatcccggtgatcatcgacaaccccgccgtgggcgagaatcttcaagatcacagtatcgcgagcgtcaactttgagatcgccgatggccagatctcgggcgatatcatgcgtgatcccaacgtcgtacaggcagtcatgaagctctacgaggagacgcgcggaggcccgctaaccggcatacctctcaacatggcctatctcccgctagtagatggaaccggcgtcgtgccgaaagaagaactcgacgccctgctctcgaaatacctcgacaacgacagcacaccagctagcctgcaagcgcaatattctcaaatccgcagtatactcctcgaccggaacgagaactccacgcactacctcttcctccctgcccagctcaacgggaaaccagaccaaacaaccatcaccgacgtgctggccaaagttcacccggagaactacatttccatcatggtgctgcacaaccacccgttctcacgcggctcggtccacattgcctccggcaagagtgaagataagcccacctacgacccaaacctgctctctcacccgcttgatctggagatcatggcccggcaggtgcagtacatggggcgcgtttccgagactgctccactctctggtctgctcaaatccggcaagcgcatgcctcagagtgccatcgatttgagtgatctggaccatgtgaaggatgtcgttcaggatctcttgttcacgtgtttccatcctgtgggctcgtgtgccatgctgccgagggagcttggcggcgttgttgattctgagctcagggtttatggcaccaagaacgtgagggttgttgatgccagtattttcccgcttgagatcgctggaaatatccaggctactgtttatgcggttgcggagcacgcagcggatttgatcaaatcccagtagtcgggtttggggctttagattgcgtgacaactagatatgggacattacctctagttgtagatacctcctgataggacatgttcattctgcagattgtatctaggcaaatggagactatggttttacagcgcgaaagtctaaatgtttaacaacaagctaaggttacgaggccgaatgcgggtgggctcagtacctctgtactgagtgttactaagtatggatgattgattggttaaagaactaatgatagcgacagaaactggggttgcacaacccctccgaggtttctccgctgcatggcagaaggttttcacggttaggctcggtcggctcgggccggttactcgatcgataatctaaattagacagacaggtccagaaattgggggcgggatcagaggacccattttcggacatagactcaggtgactttgatattgtgaaaaactatgaacgagcagttttataggatgttcttcaagccactctcgggtttagtttcatccactctcccgatactaatcgacacttatcgacgcactggatgaatgtgattcggatgatgatatgcaactcatactctgattcacagctacaagatttagaggctctgcatgtgcgtgtgttattttcttgtccaggcctaaatcgccaattctccaagaactatcaacgatccccaatgaatacgaaggatcctttttgagattcccaaagcagtgatgacaacatcagagaatcaagtgtctaatggcaactatctcattccatagttgtctcccaacctttttcaggtataacatcaacccaataagcatatatttgttcttagagcaccgactttttgctgtgtggatggaccccccaccccttgcctaccgattggtttgggaacgctaattttcaatagctaactagtgtgtccgtgcgatcgtccgtgtgattgcttaaatttgttgctacataccacataccgtatacttgaagatctctattgagacctaaagcatagcctcgatgaggtatcgacacgtagaaatgatacatctaatgtaccttcctgtgctcgagaggttatcggcaaatgaggcgggacacagctaaaagcaaatggctcatcaattttagcaggtgatccaatcgtggtactaagacccattcatctcgcttgtaaaccttattttattggcctccctcggagtcttgtcaatctcagactaatctcactacatttgggtcaagtgatcagaatttgccggtctttttgatccaaaaacgcactcaatagaatctactctatcagactctgatcctgcctctatcgtattatcattggagaactacatgggcttttctgcagtatggcaataagataacctcatacattcggccgttaagatatagctcatgcgacatttatctggttgttcctttctttccttgcccatctatgtatatcctctatctctcggacactgatgtagacttattgactcgcatatcattttcccctgctatataagctcttccacgcttccttctgcgctttcttcttctttcgcgaatttctccctttccttttttccaacataaattatccgtacaggtgccctctgatgtttatttttggttatttggctactcggacagcctttactagccagcacgaacactatactcgaaggctggcaattcgatgacaaccccgatcaacatggtagatatgcttctctagaatcctcgcctgcaactgagccattctctctgtcgacgtcgtaccacgcagctatagtgtagtttgagaaataccgttaagatctttccatggccgagaaccgtgctttgtccctggtggcatggttacttgctctggtttccatgatgaagaccgatcgaagttcgatgtcctgtagggtatttacagttgtcacattctctggccgatgttcaatattgtgatgcgcgcgcttatgtgctgtccatagcccaatgatatggtgggttttgagggcgtgttgctagcatatatattctctctcacattggtagggactgtggggaaactcaaaatccacaaatgaattcccctacatgtatgatttggagtataataaattgaaatgaatatttattgatactaagatattcgacctgtaatgtaaaggaaaaaaataagtaaaaaaaagtaaaaaagaagtgataagagtgggattcgaacccacgcctcttgcgagaccaggaaactattgctagttatggagtcaaggtataccttaacctggcgccttagaccaactcggccatcttaccaatcgatgtaaggtcgacaaatatatgcctatatgaacggaaaataagacagatgtggatagtaccagagccagttgcttcaactgtctaacaatccgaagtcgatcgaaaatgaaaacttttttttatcagtctgggcttcgtgcccgaatattaaatctcgagtgccctttaagacttgccgtgggaatggctgtagagacacctagctcaataattatccacatttactctacaaagtttttttaggtagtatacatatagaaatcaagaaaacaccgcacgacaaattgttggagtgaagtatctgagattggttcacaaccaccttctcctttcaagttccagatcaaacgaaaagtggcaactccaggccggatttcctcgggtggggctttcctatttcagctgtgaactcatcaagtggcatgggcatatcgaactgtacttttcagtccgcctgacctttcatttaatcttctccgtacagggaaaccccatgccatggcttctcttgaccttgaaaaatctaccgggagcataacaaatgcccgaaaggggccagtgcatcggcagaggaatgttctcggcccccgagatcggaagcggacagctctgacgcaaggcgctttttattattagcacggccacaactttccatggctgggaacagactggtccactcccaaaagcaaactaatcagctgccacaggattcttccatatggctctttgcagtcacaggaaggtgggcacccttcaggggtggcggtttgaggccacatgatgtaatattcgcccagggcattttccaggatcagcggtcaaaaccagcggtgaccctctcaatctgatattcagccccaaacatttctttttttctcaagctccctcttccttcactccctctaatcacaatggcacctctaaagctcaacatcaagcacctggagcaaattgcgcaggcaggcaatgggccaatccaaatcccaaagcaccgtttccgcaacagctctgttaaagagggaatcgtccacgttggtgtgggtggcttccacagagctcacctggctgtctatgtcgaccagttgatggagaagcatggtgttaccgactacgcaatctgcggtgttggcttgcaacctttcgatgctaccatgcgcgatgtcctgagagagcaggaccacctctacaccgtcatggagcgctctgacaagggaagctttgcccacgttgttggatgcatcaattcctacctcttcgcccccgacgatcgcgaagctgtcatcgccaagatggcccaccctgatacccatattgtttcgctcaccatcaccgagagcggctactactataacgaaaactcccacgagctgctgagcaatcaccccgatatccagttcgacatcaagtccggcaacgagaacgccccgcgcacaaccttcggcttcctctacgcggccctcgcacgacgctacgaacaaggactcaagcccttcaccgtcatgtcctgcgataacatgcagaagaacggctccatcacacgcaacatgctcgtgtcctttgcgcgtttgcgcaaccctaagatcgcggagtggatttccgagaagggcgccttccccaacgccatggtcgaccgcatcacacctcagacatcagccaaggacaaggaggaactcgcggaggactttggaattcaggacgcatggcccgtcgtcacagagccctttatgcaatgggttatcgaggaccagttctgcgacggccgcccagaattcgagaaggttggtgtccaggttgtcaagaacgtccacgacgtcgagcagtttgagatgcacaagctccgtctgctcaacggcagccactcggccatcggctacccaggccagatggcaggctttgaatacgtccacgaagtcatgaagaacccgaacatgcgccagttggtgtgggagatgatgcaagaggaggtgaagcccctcttgccggatattcctggcgtcagcattgacgagtattgcaagacgctcatgaagcgtttctccaactccaaaattaaggatcagctgccccgcatctgcctcaatgcctctggcaagatcccgcagttcatcatgccgtcgattgccgaggcgattcgggagagcgacaagaagcagatcgaatatcctttccgccgcctgtgtttcgtcgcggcctcttggttcctttatgtcaaaggtgtcgatgaccacggcaagaagttcgaggttgatgaccccatgcgcgaagagctccaggctgctgctgaggccggccatggcggccccgaccagctgctcaacatcaagattctcttcggtgacgacttgcgcggatgcaagaggttcacggatgagatgaagaaggccatgacagacatcgcggacaagggtgtcttggaaaccctcaaggtctacttccctgaggacaccaactagtcgctgttggtttgacgaaaaagttacaattgcgtctgcgagcgttgtttttacattttctagcatgctatctaagaaaaaatacacatacagatagatggtagacaagacttgcctactactccgtatgtacttgtatattgaacggatttctttaattaggatgagttgttttctggattaatttggagaaacgtgcgaatttcggtggcgggtgatatagccagatctaaccaatgtgaatcttaatgttattacatccgatataaagagctcgggagcaactttccaggccttgtaggtggagtagaccgatggtcccgtgggtcagatgagcgtgctcaattttacattgaaaagagaagtggacacctgtaaaaaaggaaagtgacgacgtggtaaaaactggagcatatcatgcgcaggccaatgatggttcattcatgagctatcagaatgaactcagtgacaacatgaaatcattacattcatgtagccaatcaagaagtcgattgttatcgcgattaattgactggaagagctatatatattggaggctctcggaaaatctatacttattggtgtctggtacaaaatataagctacaggaagatttgttcaaatattcaacaatgggattttgaagtatccgggataatagaacacccgctagcagtttaaaaaaggagtatgtatgaacaatgttacaaaaaaagccaacctcataaatccaacacataggtgaatataaggcagcgagtacaacgaaagacaaatccaaatcatgaatacgcaaactcaagtttacagcataaccatgaagataccagaggcaacggcagcgaccgcataggcaccggcctgccaggcaccaatgtgcacagcatggggaacggtgccagcagcaataccagaggaggtagcaccactagtagaagagccagaagagccagagccagaagcaccagcagcagtgctagcagcgagaccagcactgacggcgccagtaccagccgagccagcagagctcatctgagtagcgcaggagccagaggcagaggtagacttcttggtgctagcgacaccgttgaagccacaagcgtcgctaccagccttggccttgttcttctggtagtaaacgttcatagcccaagccagctgctgcttaggcgagcacatggagtaggcaccgtaagtgccagaagtggagttggactggactccgtccatgacaccgctctcgccgccgaggtagccgaaggtggttccgatctgcttgtcggtgatgtcggagttggggacacactcgagggagttgtacatgcactcgcagaggtctgcgttgggcgaggggggcagcttgctggcggcgttccagtccgagccgatggtgggacagctgcgaccgacggtggtggagacggagtacttgtcggagttcacgccggtcggggtggcagaggccatttgcttggagaggtagctgaagtctgagagggtcgatacgtcgtcgccggagacggtgacgaggccgtacttgttggcttcttcgtagtacatgtagacgatgccgccggaccagacgtcggtcatctggtcgccgaacaggacggggacgtcggtgaacttgcgagggcggacttcgttgcagccgtactcggagaagaaggcggggacggggtagtcggcgaattccttggtgcgatcggcgtagccggacttctggtagctggagtcgccgcaccactcgtagatgttgtagccgaagaagtcgatggagtcggcagcttcgtcacagacgaggtagttggtgatgtcttcacggacggtggcatcgtcgtcggtggcgtagccaacgccgagggagctacggtagttcttttgcttgatgtaggacttcatgtcacggacggcggccttgacgtaggccatggaattggtgttgttgaccttgttggagacttcgtttccggcaaagaagccaatgacattggggtacttggcgaaggcatcaacaacctgggagtagcgagtgaagagatccgagttccaggtcgggtcgtcggattggatggattcgctaggcgaggacagatcggtgatcaaatagataccggcatcggcgagggcagtcatacactcatcgtggtctttgctggggtcgacagcgtatgtacggacaacgttggtgcgcaattggacgaggtagggaatatcacgcttgcaggtgtcgatggccagcgggtcggtgtaggtatcggtgctgtcagcaccgttgcgacccgtgaagttgggctggtaagcgacaccacggatgaagaactcggtgccgttgttggagtagaagaatttcttgcccttgatctcaatcgagggaacatcggccgccatggccgctcccagaagggagagaccagcgatgatagaggccttcattgcgcaaaggaaatcgaaatcctaaggaatgtcagacggggtacacaccgtctttcgagatagcgaatgtaaataagtgaaagaaagaaagaatcagaaatctacaagatatgtaggaagggaggagaagaaaagagagaccctggaagggggaagagggtctaaagggggacgcgaatttatgtggagatatccagtgcatatcatttgtacaacgctgtattgatttctatttataccggatttttggtttttggtaactccagtggcagacgtgattggcaatccagagacaaacaaaccttggaagtggaagatgttgatatttcgtcattggccccttctactccctgcctccgctgtccctgcactgtgtctccactgggactccactgtcaccccactatttcctcggttaagcctttcccgttgagtccttttgcttatttgccacttcccctgagacatgtggaggcgctagtgagcccgtggacgggctgatgctgcgctaaagaccctgggaagaccctgactggaggacagtgtgggacttcattttctggtaatctattggaaagtcaattgtttacagaatactccatcgttgaacatctacggaatacacagacaatattgtatagaagagagattcaaagaagaaagcttgttcattgccaagggcgatcaatgcaatgacgtcgattggaatgaatccgagcatccttggctaaggcttgaccattgtaatacgtagcacttgaaatcggaaatatcaggattaataaactgtaatccccgtctcaaattggtctagccttggtgatggtagagtacatgtctctgaaggtacggagtacttctggggcatttcgggctaatatttgtcttgaaacatgtctctaatttatgatacatgctcttggaccggacaatactataatttaccattgtacagcagctaaacatcttatgttatgtatatgatacaattgagtaacattctattgtttcatattaactagggccaaaccatctatatcataacattcgatgttttctttttctttttctctatacttttactatacaataacagtagagagatgcttgtataaaaaataccatgtatccccatacttatacccaacaagccaatgcccgggaaatttgtccagaaaatgtctcggactgataatgaagcaaagagcccaccgagactccatactaagcgggatattaggccgccacaaagcttggtaaagtaaaatatgcactctgtactccatatatgccccgaaagggagatgattgactttctcgtagcccgtacctacggagttatatgcttggacccgcttttggcgtgatctatgatattcaggggtgcatatacccctgaaatgcactgcctggttctgtctcgaaccgcatggtttgcgttgcgctgcatgttgggtcatttcataaatatcctagttgataatcatccccatgtagaagagggctgtgctaacctaacgggaggaaatattactgcctgctgtgccgtcaggcaaaattctctcattcttacattgaaaagccaacttaaataatcatttcctcatccctgcgctaggcagacagaaaaaaaaagctcaactagcagcagaaaagaagggttctcgtcaatggcatcctgaatgttgatggagggattcgtggcgttttagatgataggaccgattgtctcgcagagggattagttgaaccacttgaccgtaacggcgatgcccttgcagcaccatatatgccatattattggcaatggttgcccagccatcccggcaaactgtatatgcggcaacagaccatttgccagcattgcttagccgaacagtgcctatctgttaggacaccccacacgataactattccaaaatattgttagtaggggacgcttggtacgttatatctcgacttccaagagattacatacgtatatgtatataaatgttggtccatggcagctggttgaccttctgacgaaaacccagtggacccaaaccctcttcaggcccaaggggaggcttcttaatgaaatcttatagtcggatcgtgtcgatatcgggcgaatttgagagtttatgaagtcggcccttctagcttttccaagcctttggatattcgccaacggttgcattttgagtctttatgaaaaaagagaggaaagggctggtttctgattgcagggtatgattgctctctaattacatggcatagaaagctcctccatgtgcactacacatattgtttaatccgagttctcatatctgacaagatctgaactctggcagcattacccttcaccgatacagtctcaaccgtggctccatagtcattcaacactgtcctccacgcattatgaagaaacgggcttcaaggccaactaccgtcatgccataaacagagctattttgggctcgcagtcccccataaagcagtagatgagtgttcgcaatgagggaaaaaagactgttggtccaagtagaagatgaaaatcccgaacttttgactttcatcactattagtgttggccgacagttcaaattggacacaactttgttgagcataccagttcaatatgtaccggacaccgataacgcaccccacactacagcaaaaggcgctgagagatagacgtcattcctcaagtccagaatacttttctttgcaggtcggtatgctcgggcagtactgtggcaaagctcacatccccacaatctctaacggttgacgaaggtatctggccaagagaagaagtgtgatcaaccagaaagatgatgatatgaagtggatggaagatgacgatctagctattccatgaagctctttatatagctccatagtgtatctgatccatttggttaaacaatgtcaaagtccgacgtagaaccgagagaacctgaaagtcacatggcccaaaatggctagcgcgaggtaggcagcaactattttaagggcccttaagatgccgagaacccatagggctgaacttttctcttttctgagaatttgtatgttgtacttactccgtacagacgacggcattatcatttgattcgaggttgacttcattgactccccttttactctgactttgcttctcactctccctcgcttcacttcagcaaccgcccgaccgcagagcttacagcacagacaccaaccaacaaactgaaaaggtgacagccaactacgtcgcaacgcagctgattgagctgagtggtcatggatattccctcgggatgacgacagccataacttttgagacgagcccaagccgccaacatccgcagtacctgcccgagcagggcctagttgatcattgatcacggcctcatcacgaagaggctgcctataacaaatgccaatatagacactgcctaatgatagtattacaatctattcttgggagcgtacctcctctcagagtatctccaaggctcccggctgagagcacgggagcctgcccaggtggcgctgctgagcgcttctacgggcaccaaccaacaaccaacaaccccgaaaaccaaaccttgacaaccaacacgtgatcgttccaatatgcgtctggcttgacctcgggacgcaatcaatgacataggaaaaggggttgtggcgtccaggcctgatgtggaatcaacacgcgagctgattgaccaaacactgccaagagcgggtcaaaaccccctacacaatttatgctggagggaatttcccccaataaacaggagacccatatctgccgctttctgtgccacgatcgtaccgctactttgtatatcgtctaccaacatctgcaggaatgcccgagaaaatttatcagatgcagtgtgaccatggtatttgactgcagaatgccggcgatcaaccaagtttttgccaagtcacccaagcacaaagcttccaccgacaaagctttcagttccacctggccaaggtttcaagtggcgctgtagtttttgactgccagcgcaccaacatccatgatttgacgatatctgacgcagtcgtgcgcaacaagaatttataaagtggaattgaaacactgactggtccccaactaccaactatccatacaaaccaatctcgcgatccgagtttgtttttttctagacgccaagatcacaatatttgctccactatacacactatacgcaccacttgtggctgtgcctttcaactcttttcgaagtctgttctccaaagaaaccccagcaaattgctacagacaaattctatcccttcatttctgagtcactccttttacccttcttctcgctgtaatcgtttcataattgtcattcgtttgatctttgttgacttcccgcctaccccttgcctgagcgcgactctcaccgttgcgactctcaccgttcccctgtgcgcgtgaatatcccggatccgccattcatcatcgtgctgtggctgtatcttgagacacgtccacatttcgcgcttagattgccgtaatcgcttcagcttgtggatttgttgagctgtccatatctcgaaaccgttagccagtgcgtgttcccccagccagcccttcataggcatccgtcacaggtcgcaggtccaagccacagttgtggggtgttttccccttgaggcaaattcaagctcatcaagctcatcattagcctctgctctgttctcttatatatatctctcgcaaggccactcttacttacgaatccatttctctacagaagccatattaagccaccaccatcatgcgtaagtccaacagctatgcatacccaatctatcaactggccagccatactaaacgtaccactagtcaaaattcgcagtaaagcccacttcgcagcacgttacggtcagaaaagagccagccgatcgaactctttgcagctcgaggatggactatcccattcccagaccttgggcgaactctcagcagaccagcaacgccgacgggaactcaacgacggcattagcgtcccagagtactccaacacattcccgccggagttcgctggtagcgaccatgaaacacacaagtccccgcctgaaccgtccatggctagccaggacccaatcaatgtctcatcgtcacgcgggcttgataccgagaccgttggatcggcgcaggcgcgccagcggaaaagtggaatcttgggcaagttcaagcatcgccatgatgacgacgagtgggaggacaagaagtcggagcatcagacctacacttttgcgtcacagataagggctactcttttgaactcgtgggtcaatgttcttttgattgccgcacctgttggaagtatgtcttgctcctgccactgatgtatggaagtgcacgtgctaattctgttcttgcgcatagttattctctatgctgttaaagccaattcgattgcagttttcgtggttaacttcatcgctatcatgtgagtggttatgccgctggctaggacgaggatatcttgctaacaggcatttactagccctcttgctgccatgctcagtttcgcaactgaagaaattgcccttcggtatgcttcaatctaccccattctgtttggtctatgctcatctcttctagcacaggtgaaacaatcggtggtctgctgaatgcctcgtttggtaatgccgtcgagctgatcgttgcaattatcgcgctggtccaaggcaaaactctcatcgtgcagacctcgctcatcggaagtatattgtctaacctgctcctggtgctgggcatgtgctttttcttcggtggtatccctcgcatcgagcaaaatttcaacgtcacagttgcgcagacagccgcaagtatgctcgcactggctgttagcagtttgatcatccctactgcctaccacaagtggtctgatcgttagtgcatccaggacccgcaaactgagacgagagctaacaagaactttgactatagttgacaaagttgacgggaccgcctctctatctagaggtacgttacttcctgggactactagccctgctatcgctttcacttttgttactcacaccgcaccacaggcaccagcgtcctccttctaatcgtctacggctgctatctcttcttccaactgaagtcacatgccgacatctacaaccaacccagcctgaaggtcgaacggcgacacatgaaagtcggcgaaggtgataccagccggggcattgcccagatcggcaaaatgaccgccacgccgttagtcgcacataatcccgaacaaatgcagatggaggatcccgaagatgaaaccgaggagccgcagctgtccatttcaactgccgtcatcacgctgattatctccactgcgtttgttgctgcctgtgctgagttcatggtatgcatatgcctttcccctagatctgttccgatctttattaagtgtgattgcagtaagctcattaatctatgcaggttgaatccatcgatgctttgacggctaccggtaacattcgcgagacgttcgtcggattaatccttctgcctatcgttggtaatgcggctgagcacgttactgcggtgacagtcgcatgcaaggataagatggatcttgcgattggtgtcgccgtcggatccagcatgcagattgcgctgcttgtgttgccgttgattgttgttctcggatggatcattggtgttgaggatatggtatggagcccaaaatttagatcttatcgggcctggcactaacttcgacagactctcaactttgatggattccaggttattgtactattcatgtctgttcttttggtacgtggatttgattctcaagaaagtgataccgtactgactgttcttgttaggtcaactacctcatcggtgacggcaagtctcactggcttgagggtgtcttgttgatgatgatgtatctgattattgctcttgcgtcttggtatgttcttgttctatatggttgacaagtggaatctgtcgcttactgattgcgtctctaggttcttcgtttaaacacttacactcattacagtcatcgggctgggtccccgttgacgatacgatatattataatttaccatcctaatcgcggggacctttttggttattatcttttctctatcacatttttatttggttttatttggttttatttggctttggattctattatgatcgcccataatatacccactctcgcggtgctttgcatgtccgacgcatttaatttatttccccgagataaaattgatctgtgattccataacagtctttcacaataatccacatcacaaaaatcaaaccaaataaatagccggacaagagctattcaaccgcctacgttgtcaggctaaaaaagcagggctgactaattcggtaacttttccccgaagagtggggatgagcagcgctttcgggactgaatctccgacaaattcagactcagcacacgaaatacgcccgtggacgaataaacagaatgcaattatgccaacagcacagtacggtacggagtatgtcctccgtacatccaggcacgatactgtagccatcggggaattaccgggctgaacaatcatgcacggtaaggctatccaaatccggactcggcagactcggtatccccccgatgtttctaaccgagccgatgtggggaggctgggatttacaattgttcctggcttgttcttcgaacccttcccatttttactgcggagttctccgtacggagggagtacaaagtagtggtcctgggatcccgcatctgcccgggcctggactgaggtttctttcgaagcacctcgccgtaaattaccacatgtggctattatcctaactggtatgtatgttgtatgtatgttgtagagaattccgtatgtcatgatatgatatcgaataatcagtacaaactacctgccgaatcagatggggtcggcaactgctccgcgccgagaagggacagggaggaaaagaggacttgatcccggacggaaattgttgggacgaaatgaaattcaaagccactttggcgctggaggcttcgacactgccgattggattggacggtagtccggcggcacgggatgcctcggataatatgaggaaggttaggagtttcctttattaatcttgtcacctgagaggctactccatatgtggggtagagaacccggatcgtgaaaggactgtgcagaggcagttagggtagggcatgcaatgttaatccagtcctccgtagttactccgttccgtatgtgatggaacatgttcaatttgccttttaggcttccccactgttatccaccggggtacggaggacaatataagaaccaaaggccggaaaaatataggcagatggccattgaccccgagtctctcttgtaaagttactatacaatacaagtccaagtctacgtcactataatatatcgattataaaaaaaagaacagacccaacttcttacctaatacaaagtaaatgcggggttatccggggtccaatggctggcgcctcggaggttgcggtccaatcgcggtatcggacggggccgaaatgtgaccggggggaaaaattcggtgtatgaacttttccgatgtgtgacgttcctgggcatgtgtataacctcggaactacacaattatggatttggcactccgcaagggacgaaaaataaaaacatatgatcgcggatgcagtcggcctcggactgtttgcacttgtacatggatgggaccaaattgtgggagtataaggatggcagcagaaatacggggcaaggactggtcgagtcaggccaattccccatcccgtgaaatatgcgtgttcttccgaggggatggcgattcatttgaccctctgccgagcgacctgatcgcttctccgattcttccactttgtgacgggtgacaagcggggggaaacacaagcccacattgtaggaatgtcacacggaggcgtcgaatacggggtgagaaggtgaaaggtcatagccaacgccaatcaatgcagaggtaactgtacttggaggatctagcatctcacctctttgcggggagagccccgaccaggcacttggagaccgttgattggatgccatttccccttcatccccagattgatgggctgcgtggatggacggccatccatgttctggggacgaggctatacccgagggatccaaatgggccgagatacccctcatgagagagacgagaaaaaccatgtgggagaaaaaaccgccttatgggtccactggtcttctgggcgtcttgtggagtcgcgtttcggcttttcattcttttcccatgaacaattcttggttctcgctgtactctccgagaatggccccccatctgtgcacacacacagactaggtatgtatatccgcttgcctatttaggtgttcccggtgcgggaagagacggtgtatggatttcccgcccagacaaatgccgatcggacatcagctgccacggggtagacctggtcaattgcctaggcagaggcgaatggtacttttgtgctccgtgccctagtatagagttctagggcggccatggaaccagggtgtaccgcattgtacgtatgatgcgcccaaatccaccgatcccccagatttaggcactgtgactgatccctcacgggccctagaaaatgccggaaagtggcggaggagaatcggccggcgagtggacgggtattgtcattccagccagtccgggtgctttggatctggatttggtccggtagaagagacaatgtcctacttgacaggccagattgccaatttttgatttttcttttcttattttcggaccgtgagctgagcccgagtcgggtagagatgtgaaatgacgatcatgagatcagagcctggtaagaatggggtagataccgctcaggcctcaggtgtttcccgtgccgagaaggggtatattagctaaatatggggttataacgagagagatggaattggatatgagttgtaattgtgaatagttaatagctagtgctaaaacaattaaatcgttatatactatgcatctgctatacatgaatcaaatccttctccagaaacgaactacatcggcagccggaaactgggggtctccacctccacgaaaagcgcgtccttgcatgcttttggccctccgcaatttcagcggctctggtttgctcttttctctcggctctgggggtttttttttcttttcacaatttccctttttcccttcttttttttctgctctgacttcatttccccggtcgtgacattccccgttccctcccgacttgtgtttctcccggtccggtgccccgactctttgagtttcccccacactccgccaattccgttcttcttctcccttggccctttccctcttgcgttctcttttcgttcacatcgataggttgtgatatctagtaagttggaaagcgagtcccaccggaaaatgcaatattaactatgatagaaaccgaacgggtctgcgtttaattctccgagattcttcccccgcaaaataacagcgcgtgaccctgatacccgtggtaaatgggagaattgcgattgatacaaatcgcctcgcatatctgcagacttcgggtctgtccaatacaccatgcggtccagcatcgcttgcgctcgatgccggcgcagtaaaatcaagtgtgtcaattccgggatcgatacaacctgccgcgcatgcgaaacgtccgggcgcaagctcgaatgtgtctatccaaccccagcactcggagtgaacaacgccaagcgggatctggctgccctggcagaaggcgacgatcgaagtaacgactgggatggcccgaaacgacatcgttcgcgcaaggtggtgggtatctctggctcctcggctgggtccaagctcggtgtggatgcgcttgattcctcgatcctgacgaccaaagtgtgggaggccgtcttcgacctcttccaatcgcattttgcgactcttctacccttcctacatcccgcgacgtttctcggccagattcgacagctctcatctccccctcctgcgcccttcgatggacaagatcctcgcaatcctgcgaataaggtggacccgtcttcctcgttgattccgctgggggtactagccctaactgctcggtttcaccctccgttggctgcagcccactcaccagtgtcgcctagccatccttcgaatccgcttgccgcatcggaatactatgctgcagccctccgcagccggctggccggcttggatggttcttgccttgctcaacctgatcttgcgcgcgtgcaggcgttattgatgttggctttgcacgagtgggggatgtgccgaggcaagagtgcttgggtctacgtgggcatggccatccggcttgcacaggccatgggtctaccctttgaacttgaaaatgaattcccagcgcgagatctttcgcgctcctcccccggcttgcgaaccgaggcagatcacttcggtctgccgcggcgtgtagagcccagagagccgacctcggatgatattattgcacaagagactaagcgccggacattctgggcttgctttatccttgaccggtgtcttagcagtggaaagtaccggcctcggatggtccgtgtcaaggaactcggaattcagctcccgagcgacaacgcatttgccttcggcgagcgggttcggacggccagactcaatgaacccaccgttcggcgcccgcagagtttcggttcccaaagcatgcaaatccccagcatccgtcaaagcataggaggctttggcgatgaaaaactcccatccaatggaacctcagataacaagtcctggtcacctatctctcgccgcaaggagtcgagcgtggaggatgttgatcgatgggaggttggcgcagaggagtcggtactcagccgggtgattcggatcattcgtgtctggggaagcatcgctaaatggtcttgcgctggcggtcgacgcacagagcaatatcccccatggcatcctgaatcccgcttctcttcactccgtctgcagttgaacgagttccaggatagtctttcccgcaacctacaatattcccagcgaaataccgacacacatatcatgtacaagaccacgctggcttcatataccgtgatgcatgttgtctacttcctatcggtaattgtccttcaccgtgcctatattccattcctgcctatccgctgcaatgagccttctggccccttagatgagccgttgttcgctgtcgacaaggtcaatggcccacctgagggtttctggcgggacagcgctcgtgagctcttcaaggcagcgcggcagatgatcgatcttgtggccacctgccaagcccgtggtgctcttgttgagaaccctttggtcggatttgctatctacaatgccgcttttatcggtgtttatggaacacatttcccacatatggatccagaggggctgatgggaactaagccaccccctgcgagccatgatagccaccagcttggtgtcacacaagcacgcaaggccttggatatcatccgagagatgcggcctcgtctgaagatggcgaccggctggtttcgcaccctgaatcgccttcacagctacttttccaaagtcaagcgcgatttccgccgggtttcacgaaatcgtctagatagcatgtcggatgcttctgaccacggtcccaatgggattcggctagttcgcgaaggtggtgctggtggcggctttgaggaatttaagatgcttgaaaagcttttcctcgactttggaagcattgaggaccagttgacagagtctgggatggatgaagactgcatcgcagtgcccgcagcaagcgagtccatctacgagcgcacgaatatgagtgatgctggaagcaatgccgtcaggagcgaaaccggtgatcccggtgaccagatgctcgacggtaccggtcgtcgcgaggtcaacagccccggtctatctctacctgggcaccaaggcgatcgccgtcccagcctaccacttcccaacagccgccaaatgccatccgggtccccttactcccttccatcccttcagcaacatcacccagacggtcccctgtacaccatctcatctcccaactacccctctctgtcagcaaccacgcagtcaccctcccagtacctgacggcaacaagcaaccgcctgaatcccatcaactcctggctcccagcccgcccgcaggttcctcccccgccatactcccaatctctccctcccatcaacgcagccgcctcacacaccatccctgtccttcccccaccgggatccgtcactcaattagccccctcgccgcctctgacctcaacggaatacccagactcaagcctgctatccacgagtgtcggtggagacgacgtcatcgccttcctggatgggtgcgaatggagtcagctatccatgctggcgccttctgagatcggtattcccgccggttggcttagcacgatctggtccccactcagccgctaggtcctcattcagccgctagagttcccacctctccagcaggcacgcatcgaagcagtggcaccaatcgccttgcttcattgtattattactctttacgaattccctcgtccgttacgtcttacgtactgtacgatcatttctgtctctctctcctttatctatgatcgctggcgactcaaaaaatgagacatatcctgcgggaaatcccccgagtgccgaaagcaggcgaattaaactccaaatccaatcatttcctttcctggtctggcctcctcatttactggcccagactcggaatttgaaacgggatcacgaagattgattatcacctatacccagtgcgcgcgaccttgtctttttctatttttgttcatgttcatgttcatgttcttgatattgttcacttgctacctgtcctttctttttctttgggatacgctgttcaacatgcgtgcaaggcgttcctcgtgatttcccgccaaggtggccgtgaaacccgagttgattgttcatttatcggcaatgtttatctccatattggtctttgtccgtttgtttcgagcgaaatttggggtggcacgggagcctggcagcggtggccggcttttttgacttttgttttttttttttttttttctcctgtgtcggttttacgtttttacgatagcctaggcgttgcatttgtcttgcaaactgcaattctcttgggtcaatttatctgcctctgtggctgttttttatccggcattcacttcttcccagcgtagggatagataatatctctcatagaagtacgggtggaaaatagtcatatatacctgcaccatacctataatttttacacgtgagatcttctctgacggttctaataccatccatccaccaatacctcacaccttgaatgctttcaatctatatataataaagcaaaaacaaaaaacatacaacagtgaggattcgctggtggtcacccacccaactactaactcaccggcgnnnnnnnnnnnnnnnnnnnnnnnnnnnnnnnnnnnnnnnnnnnnnnnnnnnnnnnnnnnnnnnnnnnnnnnnnnnnnnnnnnnnnnnnnnnnnnnnnnnnnnnnnnnnnnnnnnnnnnnnnnnnnnnnnnnnnnnnnnnnnnnnnnnnnnnnnnnnnnnnnnnnnnnnnnnnnnnnnnnnnnnnnnnnnnnnnnnnnnnnnnnnnnnnnnnnnnnnnnnnnnnnnnnnnnnnnnnnnnnnnnnnnnnnnnnnnnnnnnnnnnnnnnnnnnnnnnnnnnnnnnnnnnnnnnnnnnnnnnnnnnnnnnnnnnnnnnnnnnnnnnnnnnnnnnnnnnnnnnnnnnnnnnnnnnnnnnnnnnnnnnnnnnnnnnngcgctagaggggaacataaagcagctgagaattatagactacagctgggacaagatagtttatatctcatcgtgaccactaggtcatgtgacctatacgcctagatggtcatagcgctagatatttgttggacatggtggtcacctgaccatcagcccggtgcggcaggcaccaacccccataactagatagttgggcattctgccctttaggaattgacaactgtgatacccctaggtatggaacgcctaagggaatgctatatctaatggaggattgggaaatagagaccgtagtatatatagtagtatgtttagaactaatagctacttcttctaagaagtagtattaaaagtacacgcagtaagagtaatagagctaatatctccgtttcgaagagcctagatagctaataaaagcctaccctcttgctgttctaatttgctagcggattgagagcgaattggtggcatggtgggtggttgaactaactaggtgctaattcatggacgcgttttgggtaatccgcttattgtacatatttttccttggatagtagggtgtaccaaaagcgggctttgactgtactagtaatcgagtaatataaccttggtgtgtaccctttcagtctagcggcattgttgctctgcaattcttactcttgaaattctcatgaaacttccaacaatctggccaactctcttgtttcttcatcagctatgcccgattccaatttattcagcaacactggcctcccggaaagatttgtcttgacgaaacttcaagtccccggagagcttgatgatgcgcaattgacagaatattttcaaccattgcttcacacccctggccacaatcgctctatgtggggaatgattcaagataaacccaaaactgctctactagcgacttgtaagtagcgctcgggaattctaaagataaagatactgacgtgctcatgaattctcagtgtgggagacaactgatgcaataaaatattttcaagactctccctcagcccagcttctctgggaaactttggcagcaaagaacattataatctttagctcccacgaaaccccttatgttgggaattggtttgaggtcttggattcttcattcattcaattattctgggtctacttccaggctcctgtaaccgacgctcagaggactgaaatttcaaagctgagaggccttcgtccgccagcctcgggcttcagcgtaccgagacatcataggcctcaaacagaaattccgaccaaggcatgggcgacccagccagaaagcaatgcgactcagttgatgctgtggccacacttttggcggaactcggaaaaatccgagtggaggcacggattgacagaggtgttatttggcagtacaattataggcaagcggtccagaattgacgatttcgatgctaggctacaagaggtgggctcagtgaaatggacagaagacttttgctctttccggaggatacgtgcttaacataatttttcgggctttatgaaaaacgttatctaaaatcattctagtctaatatttcagtggcaaaaatgtctttcttttctcgtcccgcttgcttgatatattgtacgcctgatcataccgagcttctactaaactctgtcccacgatccttttcactcaattatagctgaaggagttcacctgcaccagaatggaaactctacctctggtttgtcgaagtccactgagtctgctggaagtaccaatatccaacaccgaaccacacatatgtctcaggatttcgtcgaatcaacgtctggtaatttttatcgtagccgctcgggattctatcgggggtcttgaggtatttttgttgttcggtctatgaatctttatatgattagtaaaattgagtggttgcgaagtttctaaacttacaagtactagtaatatctggagtctgttcgtttccaatcgtgagatggaacagcttatgatagaacgtaccgctctgtgggagaatatctgtgatagaaaggcccttcgcgggttccttgtctctaagcgtttcaccggctttgtcatttgtaaatgcagatggacataatgtgatagaactaggggtcgtttcatgttgggtggctcccagatgactattgctcacagtgcagtaggttttgcctctgtaattaatatcgaagaggtactgccttatgtcatccgactaatacggtacctgattattccgtatactccggccatttttttgcaccgtctaaagtatttcctgataagacggaatattcttaattgatactgggctcaagtggtcactggtagtcgagttgtatttaaagatatcatttctattcacatccttagctacgttagaccgctgtagcttttggagccacttgtcgttgcagaataggtatggaatgttggctgttgtagtctgtctatccaagaagttctttataatttgaaggttcgctattgtcttgtcagtacattgcgttcctttaggccatattgggaaatttactttgaacgagattcattgcgtccgtattatcgggggatatgttgaaataagactagagataatcctttgtaactttattctctgacgcagaaggatttttggcatcgcttagtgcctgaaggcctgtattaaccaaagtcctactctcagacagccattttctaagcggatctgggagctgcgagctatagccgccatctgagtctgtgctttctttgatttgaaagagggagtcaagacttggtaaggcgagcacgatgggtataatatagccctaaactagaactagaaagttgatatgtatcgccttgatcaagcgcctttactcaggcgacgtggtatgaggatgtcggagaagcctaagaaatagaataatttgaacttattctcactacttcgcttatgcagtatatcttatatgaaaataatcgaattatccaaaaattacatatgtatgcctatggtattgttactgagacataatgtcggctctctttcggtaaaaaaaccatcgcagggtatggtgaggcccttctaaggttggttggtcacttatatttgttgaggcgctaagctttaggaataaaaagtcttaatagccttggagattggttttctaccgatgcttaagagatgataagaactgcgacgttcttggcgtaaagatgtgagatatgtggagttgaaccgccagaacattttaactagtggatcttggcgattactgcaatctccggctttctaaagataatacttcacaatagtttgaagaagtcgcaccttactgcataggcactatcagccgtgtacggtgtcatttctgtggtcccacatcgtcggtctactcttggcctttttcaatttaaaatttgaaggcatacagccacaatgtaggggaaattatgcctaaagggctccggtgaagtttgattgaattgattgaacgaaaagagcagctaatgtccaatcagtgggttgtagaatacaatatttgagactcatattattcaatagattcgggatgtggttagtctactctttcaaccatagactatgtttagatgtaacttgcagtatgttgggtgaaatataaagagattgatggtgttgaaattaaaggtatcctacctacaatttcagcgttttctctggacctttccgctagaagtattatttcttcactcttgacaacttactgtcacaaatggcatcgacatctttattattcttcctggctgcccttgctagcatcagcggggtctaggcctcatctgaatgcttcaaatccgtctacaacgagacgatcgccttatttaacagtgtaccttttgcttacagccttgatcttgatacggtaagtcattgtcagaactggtgtaacgaaatccctaagtgtcaggtgtgggtttatgtcgaaaattccggccattgtgacctttatcgtactgggccattaagtctttcggataatagcggcttcactttcggtggatgtgaacctgccaatgtaactcgacctgttgttactaccatagaccgagctttgattcctacgcttagtagcactcctgtggaatcaggagacaatttctcggtatggatctaaatcctttatggcgttagtatttcatgttcctagctaaccgtctgttccttgtagacccatgtaaggcgcgaagtgggtcagcactgacataaccgctaccaccgataagggtctaatgcgtgagatggtggaagagcctgagaaagtattttgaaatcatgtttagagttaaaataaatatagcgattggtcaattttatgataggcttagggaagacttctctctgttgtattattagtaaatactaaactgcgtttgtctactcaattgcgttcatggtagacagataagttagacctaggacgcggggcaaagatgctggtaagccgaatataacgcggagcacaaaatgccgagtaattctgaacctatctctatccttcaatcccacgcgaggttaataaagccactgtgctactaaatggcagcctaggtggcagcgctagtgtttagtgtgataaaaatttccagggtcagggtccaagacgctaattttcggatgcggcgggtcctcgggatacgctgtgaaagagatagcagattttccaagtggtctgtgtaggtactagattagctagtgataatttctttagcgttgaaaatattcaaaggatttagtctggtgggaatcagttcgctatatcccgaaaacgagaagtctgtatctggtagtaactgcgctcagtgcgccacaataaagtagatgacctaccctgcgccgattttgcgaaggtgattgggcattctagttcccgaatcgagatacctgacgagataagaaatgtaacgcagatttattctaaacgggaaccaggcgcttcatttaagcaccggagggcacgttatcccggtattattatcgaggtacgctcttcacaagaagtctttataacatcgagacagctttgtgactttcattcgtgcgccgaagaagaacagcaactacagatgcttcagcaaggctctaccaatcgactacgcccgggtgatagaaagcgtcctcgacctcaaacccctccggaacagccaagtttggaagagagaaaaggggaaagtaaatgtggccgtcgaagcagcgatctttgtccgaattcttcgtctggatattcgaaaggtgagctgggttaattattgaatacatggaacaatccgcgaaggatatatcttgtttgtaagtatatgccctataactaactaatgatctcctagttatgagatagtcatttttgcaataattccaagctttcaatgattctttccccacccctacggatctgctactgagctcctcaaacctagaatatatcgactctcgaggccctgctatattccctttctcgatgtggaccagaagacatactaagctcctcaaaagtcaatgtaagttacaatctaccctgagaaccaaaatagtctcgcaagtactcaccattttccctaaagcagaatacaagattataagagcaagacataaacactcccccacatctcggcccgtggtggggacctttgcgccagccaaaccatgtcatctctctagatacgcgggatcaagtttgtttaaggcgcattctcaagagcctcatttccttttgaaaaggagatgaatggatatacagttctctattgaaaagcttgcggcaagtttcaccagaatgagatggatgtgtttattttacaacttcaaactgcaattccgcaattccggtcgcatatgctaacgacggaatgatgacggactttacgactagtccatgcagtccacgcatccgcccaacaaataaagcaatgatctccatcgaaggaaaggatacttaagacgctgtggtgctcattctcgatagtgaggaaacaatcacgatgggaccgccgacctcgaaagtagccctcgtcactggtgccaacggcatcagtgggttttccgtcatagagcatcttgttcgccagtcaaaagaagaatggtttgtatcaattccgatacgcggtctgtatttattcactggatctcacggttccttaggtccaagattgtcgtcacttccagacgccccctgcccaatgcctggatcgacccccgagtagaattcctggctattgattttctagacccagtggaggatatcatagccaagatgaaggacatctgtgctaatgtcactcacgcattcttcacctcctacgtccacagtgacgatttcaaattgcttcgcgaaaagaacgtcccgttgtttcgtaatttcctcgatgcaactatctcatcctgcaataagctccaaaatgtttcgcttcaaaccggaggcaaggtaagcacagcccctttgttgttttatccgactgtggttggctaatcgaaattaaatagtattatggtgtgcatcttgggcctgtgaaggtccccttggaagagtctttcccgcgatacgatgaccagggatacaatttctactataaccaagaggactatctcaaggaacttcaagcgcgtgataggacctggtcctacagcatcatcagaccaaatgccattaacggttatgctccaaatggtgagctcaccccagactgttctaggaaattctaacaccatatcagccaatggaatgtcggaagttcttacaatcattatctatatgctcatttgtcgggagctcggccagccagcaaatttccctggaaatgagtatttctggaactcgatcgatgataactcatacgccccaagtgtagcagatctgactgtgttcgctgcctctcacgaaaattgcaagaatgaggctttcaaccatgtgaatggtgatatcttcgtttggaagtatatatggcaagactttgctgcgtatttcggtatcgaggtttgtattcataccctttatcttgatatgtcaatctcctctaactaaaacgatgtaggtcccagagccgaacttcgtcaaagcccgtcgagctgataccctttcaaacgagatcgacatggtggaatgggccaaggacaagcggggtgtctgggagaccgttgtgagaaaatatggtggcaaagttgaaaccttcgattgcggcacttggggattcttcaactgggctagtggcaaatcctggcttacaatttcatccatcaacaaagccagacagtttggctggcagcgaaatgacaggaccttcgacacttggatcgaaacataccgctccttcgaaaatgcaggagctttgccctcgcgtgcggcgttactcagggactagtcatatcttaccgtcccacggctatactagtctatcatcttcagctattgtttatttcgctatagtgccatatcacgtacatacgaccatagggtgtggaaaacagggcttcccgtccgctcagccgtacttaagcnnnnnnnnnnnnnnnnnnnnnnnnnnnnnnnnnnnnnnnnnnnnnnnnnnnnnnnnnnnnnnnnnnnnnnnnnnnnnnnnnnnnnnnnnnnnnnnnnnnnnnnnnnnnnnnnnnnnnnnnnnnnnnnnnnnnnnnnnnnnnnnnnnnnnnnnnnnnnnnnnnnnnnnnnnnnnnnnnnnnnnnnnnnnnnnnnnnnnnnnnnnnnnnnnnnnnnnnnnnnnnnnnnnnnnnnnnnnnnnnnnnnnnnnnnnnnnnnnnnnnnnnnnnnnnnnnnnnnnnnnnnnnnnnnnnnnnnnnnnnnnnnnnnnnnnnnnnnnnnnnnnnnnnnnnnnnnnnnnnnnnnnnnnnnnnnnnnnnnnnnnnnnnnnnnnnnnnnnnnnnnnnnnnnnnnnnnnnnnnnnnnnnnnnnnnnnnnnnnnnnnnnnnnnnnnnnnnnnnnnnnnnnnnnnnnnnnnnnnnnnnnnnnnnnnnnnnnnnnnnnnnnnnnnnnnnnnnnnnnnnnnnnnnnnnnnnnnnnnnnnnnnnnnnnnnnnnnnnnnnnnnnnnnnnnnnnnnnnnnnnnnnnnnnnnnnnnnnnnnnnnnnnnnnnnnnnnnnnnnnnnnnnnnnnnnnnnnnnnnnnnnnnnnnnnnnnnnnnnnnnnnnnnnnnnnnnnnnnnnnnnnnnnnnnnnnnnnnnnnnnnnnnnnnnnnnnnnnnnnnnnnnnnnnnnnnnnnnnnnnnnnnnnnnnnnnnnnnnnnnnnnnnnnnnnnnnnnnnnnnnnnnnnnnnnnnnnnnnnnnnnnnnnnnnnnnnnnnnnnnnnnnnnnnnnnnnnnnnnnnnnnnnnnnnnnnnnnnnnnnnnnnnnnnnnnnnnnnnnnnnnnnnnnnnnnnnnnnnnnnnnnnnnnnnnnnnnnnncgccggtgagttagtagttgggtgggtgaccaccagcgaatcctcactgttgtatgtttttttttttgttttttttttattcggtgtaaatgaaatatagtaataacatatgtttttatggaacactatatgtaataactttttggaaattaagcttgacgagacataaatttgacgtatctatctaacgctatgaccatctaggcgcagaggtcacctgacccaatggtaacaatgagatataagccgtcttaccattccacccacgactatagtctatagctctcagctattatatattcccctacagtgctgtaccaagcacatacgaccatagggtgtggaaaatagggcttcccgtccgctcagccgtactcaagccacacgccggtgagttagtagttgggtgggtgaccaccagcgaatcctcactgttgtatgttttttgtttttatctattcagtatattattcagtatagatagcaatagatgttcatctcaggccaggttgtgggattctgataatagcattcttggaaattaagcttattatgggtaagcctttgtattgaagtagtatctgaaaatcatcgagtcatgtctgtctatcacgatctataaccaactctataattgcttcgcttcgctgcacaatgatcaggcatttcatatcgcctggatgcaaagacataaatacaagtgggaaagaaaggagtcatatcgtcgtggtcaagtcttcacatcgaggccgtacttcctttcagaccatcgctgcatatcaatgccccatttcgtgatagcaagcacaaggaacccacttattagagcaaagaatacacctggatagatggtcagatatgtcttgatcgtgacctcatctagaaatctcacagattgtaaatgtccatcctactccgatagcaccaattaccggctcaacagccgccgatgctgcagcagcaaagatatactgcaccacgtattttgagctgatcacctccgaacgaacatgcggcataacctctgcaaggtagatagtcagttgagaagtaggacaatagttcaaacagatgacactcaccggccgcataagtattcagtccattgaaagtacccagaagccctacgcccgcaaagaaagcggcgataattggcacaaccataccaccaacttcttcctgtaaagtccagccgtagattaatgttgcacctgggaggaccccgaaaagggtgaccagaccactgttcagtcgatcctgagggaggcgttccccgtttcgtttgagaatccatttcttcacggcgtggtcggacaacctgccgccaatgacgctaccgactagaaagcctattcctggggagaggtagaataggccgctgacgagaggagtcgtcaggttgaaacgtggattgaaaattgagcgggctgatgtgagaattgagtattggaatgtagaaagaaggccacatgtgaggcactattacttgttagtcagccactggacaagatacaatttcagtacttcaactggcagatgatacttactgcaagaaagacattggggtatatgaattgacgaaagatgtgtagaggattgaacatgcttataacagtgcaaaacttcggtttgctagagctccggttcttttcttggatactcggcacgaaaagaagagacaagatgagaccgagtaaagtcattgcgaactgcaaccagtagataatgcgccactgagcaaatgtgacgatgataccgccgatacagggtcctaacaaacagttagccaccctcggatgatagagataattaatgatagtacataccaattgcaggcccactgacagacccaaccatgaagcagccgacagccgttccacgcacagtctaaactcccgtcagtaagtagacgacaatcgggcgggggggggggggaaaggaaaaaaaaaacgtaccggttcaaagatatctgcaagaatagtctgcccagcaaccatgaagaaggtaccggtaaaaccccccaaaatgcgcattgcgataaacatgtgcaaattgatggccgcggcggtaccggctgagcatgcgcaaagcacaaggatagctgcattatatgcattgcgacggccgaatagcttagtgataggaccccaaataaaagacgaaaaacccatagcaactagaacgccggcattggtgacattgagaatctccgatgtagttgaaaactcggtagcaatctccggggttgcgggcaatagtgaagtactagagaatgtgacggctagagtcatccagctgacgacaaacaggatcaggcatttgcgccatgttggtatgccatgggcgtttgagggctggggttttagggccaggtcatcttctgattccgattcttgaggagaatccacctgcggggttggtttttgggactcaagatctggtctggattccatgatgattaggcgttgggtggaattagatagtgtttagtcgatgtaaaaggttgattgaagattcctgcatgactaaagtagtgaaattatgtacacagaaaataatccaacagaatggacattttgtatgcgacccttcggcgtgtagaagctgtcgccgaagtctagtttttctcgcgtagcatttttccccgatgtggatctgacagggcgatcggcgtgggatagccgacagtttcattttgcatttgcacttcatccgtcaagtcaaggtccggtgtatatcttcgtttatatgctcggaagatttctgagtcaagagaaaagaaagagggcgacgagaatggtacgagctcgcgcgctggcctgtaaaataaggcgttttgctggccggatcaccaggtcactatagtgggccatggtaatagctaggaagcatctactcatgtaggtgcaaaactacattgcacggagtatacacttcactcggggagtcactattctcttatcctaaccccaaggacccaccagagagtcgaacagataggcgaaatttagagtcgtgcgatgattggaaatagcaatataggagtaatgagtaatcaaacaggaactgtatataacacaggaaatgatagaagcgatgtcccaaaaagagtgcattgtcgtgatgggaatggtccctaaatactctctgaaaagcaaccacggccttcttcctagtagaactctccctgtaaaatctgtctgggctcggatccgctaggattctgccagtagagagacacagtttcccaggcagtctgcccactcccttcggaaatgaggccagcagattccagatcttcgatgaaggtatatatccagaatctgcacccctcccactcttcagtgaacatgtacctatcgtgtccattcaagataatcaattccgtgatagtttgaactgtggcgtaggcctccacagtgaaggtcaaagtcttgatcgcattatttgtcgacgtgtaaggcttggaagatatgtctatcttccctcttaatccatcgtcgccatatccaggtgccatgtcgattctgactgagccagtatcgccaaattgcaggaaggcagcccagtggttggttggaggatttccatcttcgtcgccctcgttgtttggattgatgtagccacttatgtggatgtgtgagacttgtgcctggagatcctttgggtttaaataatccgcatcgaagttgtcattcatttctatatagcgtgtaagtaaatttcaatcttttagaagggatagttgttcacctactaaggtgattgtgaatgatgaactagacaccagtaagtagttgcccgtttttcaggtcggcgagagcgcgaagaatggttattcaaatccataagaaaaccacggacatttatatcttagccagttgcaaaactatgatagagaatgtgatcaataccccaggtgccaatgctgtttttaccgtcagcttcggctttggttagtacttgacgagatgtccaatgaatcagctagcacggtgtatagaaactgcactatttgcaaggatagaagaggtccgggtgtcaattaaaagtagactgttcagatgtcatggtattcttagaacttacattacttctacaactctcatctcattgctcaaagaaaccctgcacctcgacatcttcctctccgtaggcctctcttgatacagatgttacgtattccttgaggcaccagttttctttatctgaatcatttttggccggtcatttaaagtcaaactacgccacgagactcatggagcggcccagcccgggacagtggaaggattgctattcgtttacctgtttctaggggtaactaggtagctgcaaaatcgctgcgtccacttctatgattcgagcgaagcctcacttgtctcgtgttcacattcattacgcttaggtgtcctgtatgcgcatgtattgctggcatgctgaatattccaaattaagacaccaacccattttgtaaagttcatgctctattcagcccagccaatccatagcctgtatgaaatgtctacggccattcctattggttcttttatcggctactcctaggatggagaggcttactgagaaggccacgtaggagtccacggccttcatgtcagatagagcgcagcgtgcagaacacacacctatgcactacacacagaatgaaaagattttacagaatgtggttccactaggatagaaggaagattattaaggtctgtatgatccctatccttgctagcttacctccttggatggtggtgttgttgcgtcgctcgcgtcttgtttgctaggccagactgcccatcctgcatatccttctccactaagtacgtatctattgtgagaatatcccactattgccaaggctagcaccacatgaatatacacacttctaaagtttacctgggctattaaatgcccatgtatatttaggaggctaagatgcagggtatctacttggtcctccattctttaataggtggaatcgtcgcccaacagcgaaccgggtgaacttaaacctcatgcgctctaggatgctagcctcacgcccccaatagccggccgctatccaggagaacaggtgccaccgtaaacgtgcgaaaaagccccaatgctggggcattatgaaattttgcatgcccgcgtattcaaaatagatcggatagaacccagcaagatcccaatctaaaatccaaatctcatccgacggactaagaataatattgcgtggtgcgaggtcatgatgcgtgaagacgaagggctctgttgaaagcatttgtccttcgggagtgggaatttcaggttgatctgctgtttgcattgcttttttcatagaggtgaagttgatccaaaaccggaagaagtactccatgtccctagagctgcatcttgcaggtaggccataccgatcttcgagataaaatgaccgacactcgcccgttgctaatgatccggccacgggtgaggtgactgatcggagatgctgaataaagcgacgaagttggaaacccaactttatggtgagaaaccagctcagttgtgtccacgcttcctccagcgtccttcctggaatacggtccataacacagtacgtatcttccccatccctaactatcctcttcagagcgggaactcggatgcctagttggcaagcgatatcggtcgcccttatcatgtcttctgcctcgtgcggccgatagaactttgagagaaagttcgacgaaagtagggatattcctcgggtggatgcaggcgaaggggagctatggatgcgagaaactaactcggtatctgagtagctccgcagtaagtcatcctggaaattcgattttgtatccatgtccattgttagtatgtgactgctccaacgaaagaagatggcctcagctgatacaaaagtcactagggcaatcacgtgacgcgctctctgttgaccaatcatatccagttgactagctatatttgaattactgggcttcatcagaaagtactggagcacgatcaacaattatatttatcaggcaccagatcacgcgtatctcaatataggggcttatcggtgatggatataacagcccgtttgacatgtttaatatgccaccaagctatgggcagattgcagaagacacggattcggtgacaaagaggaatacgactagctgattgggtttaatctatagatcttgatagattttactcaatatacatacatatggattactatcctgacccaacttagttttgacatacaacaattgcttcccctgtaatcaacaaaataatttcgtagcacacgtaaggacttcacgttcacatcatttagaatcattctactgccatatctaaaaggttttctacaatacttttttattctctttttgacccttatgctggccgataagtttggactcttttaggagctcttttgataattcttctaactccttttttaaatattttcctcctattttctggaaggaataccaagagctgccggtaaaaaatatgagccgccgagtgccgtatactccctcttcggctcaagagataaaaacatagtttgatgcattctgacgtgctcgctgttaccctatacagtttataaatcttcactatggcattcctttccctttctctcacttttctggcaggcagcttgccgttcagcttgctacattggcactttctttgtatatttgcagagatgcttcttctggcttctagggggtagaatctagtggctttgtagcatagagcacaatttaccaccattaccgtttactttcgtaacccactctccatatctactttatcaccagggacctctggtatcattttacttttactcctactatgctcttccaatgccgccccatcaagccctgttataaggcacccttatacctcatttgaaactcacatctattaaaagggtttatcaagcacgtatcagcgttccttagctgcatgaaactcggtaggctttgctccccacgcgaaaccagacctcattcaaccgattgaagctgattaatacaggcttactgaatatggctcaacaatggagttctacagctataggctacagtcgaaagaatattatagatcccgtcccagaaattgtcttcactggaaataaagatggagttcaaggccggtttttccaatcagttagacatgtcgttggagcagtgcttcgggtccatggtatagagagctttatggcagtagctagatcttcatattccatccatcatcatattctcacttttggttgatcatttccttctctcgtagtcagtgcctatattatagttattagagaggacgcgatatcatgtaactacaatctctgttatagaatcctacacttccatccgtcacttcccatgtctacaaaacaatgtcggggagcacacaagaactgcatcattccaatacatcagatatcatcaagatgtcctagtgttccatgtacacttctagttggcctagcgcatatcgcgaagaccgacggaggcctatacgaaggaaaaaaatctcaatcttagaagtcaaaccatttgccttatgctcgacaaccagcttggacactgatgcagatggggatcgaaatgatggtctatatccatcaatgcgattcatcccctttttttgatctcttttttggcctctttctaacattctttctagccccagtgcccctccagcaatgcgagggcgaatccctcgtgagtgagctcgtccgacttgtggatgagaagggccttgccttcggcctgaaagtcgtcggcgttgtgactctcgccctggttctaagggagggagtcctcctactatcttggtggctgagatactgtaccgagcggtatatcactcgttcgttgtctaggatatataggaacaacatgctaacctttggttcttcgatgtagtcggcatagaaaagcggatgcagacgacgttcgcgctgccggtcccgatggcactaaggtacaggcggatttcacccaaaattgagccaggaggggtgctgtagtaggggaataagaggaaggggaggggctagtccctcgtataattatgatatgatcattgatggggaggaggggttggcatccattgtatataaccaatccggccaactgtatatatcaacagcggtctaaagctctcataattatcacaaatacccgcatccgtacatgtatcgctgatatagtcatataaacttaagaataaatatgaccaaggagtgcttgatcttattagcttcttcaaataaggcagccataaagaaaagacctaggtattctcttacagacagagagagaggattaagaggaaaccgagatataatgaatacctacttaaagtatcatatcaaagataatagtgagactacaaattgagattagagagctgcagatgctatggtctgaaagacatggacatgataggagacgtgaacacatcccatgagcatgaaagcaaaagcatgacaaagaacgtacccactgtcccctcgtctctcatctgctctctttccattaccggtcatgaagtagaaacctagttgcttgaggggacgggacatccagggactacagcaaagccgattccagtgtcatcagagacctatatgagtagtataaaagctcgttcatgccgcttaatagaactgttgccgcgcgaagttgcagaagtctaatatcaacagaaagcgttttacatatttaagatcagatttagatagtcaaatagcgttacctataggacgatttttcccatttgcattgtacatataacaattttcctttataaaactctctcacacacaacttgatacatacgaccatagggtgtggaaaacagggcttcctgtccactcagccgtacttaagccacatattctgcacggccaatacttaatgtgccctcagtacctaagcggcactctagggtgagtgcgggtgatataggtaagaagtcttgagactggggtaagaaaggtaagaacggggtgacaattctcacccttaaggtaataggggctaactcactctaaacctatatcagtcctaagaaaaatacaaatagtcaagccccgaggcgcttctcttactctaccatgattttctttgaatctctttaccagctaaaatatattctccgaaaataatatcccaaaagcactccaggaacgtctcgcacgtgcgatatcacgtggcttcacacgtgactattaatataagaaggaaaaagagggtaatactatatactaccctgagctagcgcctactacgctagaaaaatataaccgtacagttaacaattaggcactgtaagcttcactcggattttaccgattttagttcctaattattagtagatagaggatttcctataacgagtctacagacccaaattttcctaacctacctattctgactcctgaacttttgaaacttttcgcagagttttatatcaaattatataaaaaggttctatctcagcagtcagcttataatcacttcaccagctttatattgaagtaggagcgagaaacttctcgatcccttcctaaggaagttaaggacgatattcttaatataagaggtaataattatcctttaggactcgctactaataaaaataaaagtatattagaaccgaactcacagtagaatataagctccctacaaagcccagagagcggttcctagtcaacgggaaggacatagcctacctacttcgatacctatttatagataactgtcacaattatatatatgagagagcacgtatatagaccgtaagttctctctctttatttactggcttaggtataagagcaggggctgttatcgaatcaagtacttattataaattaaatgaatgcttatattatagggtttgtatcttaacgattacaattcctgattatattaaaactgactgataattatcagtaccttttattttatcttaagtagagtaaggaaagggggtctctaatacgttaggtaataattaatcctaaattcttaaaaggctagtgttatcgcgatgatactaccttataagtttacgagctataatcattctatctagaaatagctgatataatagaattagaccaaaaaattggtttagggagtatctagtacttaggataagttttattttctaggtaattgtctataggatagcggatggtgcctttaaagggcttgccactgtaactaaggttcttaccgcaaaactacctaatagaagagagttatagaccttagaatagaatgaaactataaaggatttgctattctttagaagggttactgcttaaagacccgacctaacgaaggcgttaaccttctccttattgtagtacaactttactaccttagcccagcgggataggtttaaagaccagttacgcgtatatagaattcgaggaggcattgtaaataagatcgactataagtatatttgtaccgttatacctcaattttactaaggaatttcagctaaggcttcttaggctacttatagccaggctcttaattactagaattataatacctatctaaaatattagtcttctcttaaggtattagatatataagccttattctatgatttagaccctaactacgaatactacgatatagaataaagcatatcttattactgagacttaaacgtgccgctaaaacttaatatagctataaccatataatttaaatctaataataaaattattaagatcaattagagaattacctacttaacacaggagattactagaagactagaagagaatagggaccttatatttaaacaggattgtctctataataagaaagtaaagagattgcttgcctagaagaaagactttattaaaaactagtaggatactttatatactaagtatatatctaggaacaacttttctaaatataatctaacgcctcttttcgatatctataagaaatatctactagagcgctcctatcttagtaagaatttattaaagaaagtaactctagatagtaaacttagtcgatagtacctagaagatatagtcactatttatatatcgatagaatatactatttactaccctagtatagcccctaaggaaggccgttatctaatatataataagtctatactagagtaagtatacctaaagagtattatagattaaaaagttaataagaagatagtattctactataagggagagctaagtatatactatagtgtcgaagaaaatccttaaatagtatataataccagtagtgctataagaacgaaaagtgcacctatcgacgcgtatagcgcagctttatttaattttattatctttatactaaactcttccttaacgaagattcctaggagaattattgcaaatactatcttaataaccttaacccctaatatagtcttttaactttctactctatacttattatactaggattctatctattctacctaggtaataaaagtaagaaactagacgagagatttcaataataggttataaaatcaactcttttaaatcatattaacgaatacttagggttagcggactctttagctatagtcttctaccctcatctgtgttacgaaggaaggaagtatattgataacttatatctccagtggcacttctttgatatatattccatagaagagccccggtcaaattgtgttaaacgaaaaagaaagtggcagcttcagtcagagcctgcaggaactacttttgggaatttgagtgatgaaacattgccgagtttagaggattattttctcaccagcactctgccaaccagttttgaggattcggatatgacctctatagataatttatttatagaatttatacacttagataacgactagggcagagcattgaccagggttatatcgttgataatgactattacaagaaacgaaggtgcttggtgttgcactaatcgtcattcctcgctatttattacacgattaaacgatgctagattgacggcatatttgttggtcagagatttagtgttgatacttatttctttcttcacatactttccttaacaattttaatgggtccgtggtcaacaatgagagtgattgtactttaccttaagaattacggcatatagtacccctgactttgcagcacttccggaaattggtgtcaccacgtacacacttcgatagattctcgaaccctagtgccaagataactagtctgttctattgcgtttgacaatcgcatagggagagggcaacaacacgttccagcttgctcgaggatctcaactggggtatttttccgtataaatgcgcgatcaccatgcgatctggatgggcatctagggggatgtccgtataaaaaccacagcgtatagaccatcagcacctgacgacacccttagatgtacatcccctcggcatggctctataagtatgcatttcacaggctcattcaccgtttctaggcaggcccttagtgatatgtgaagtacaggcctaagtgctaaatctcgctctaatcctatctagcattttgcgagtaaagtaattgcccgggcatcacctaattaccagatcgacagtctacaccaatcaagcgcatccacttgcactatatcatcagatcgacggctacaccaatcaagcgcatccacttgcaaaacctggttttataaaacgaggtcactaggctcgactgctataacatttatggagaagcaaaaagtaagggaagtctctttcgtattcacgctagtgatatggaaaacccggtaggcaaaaccatatccaaagagatctatatactattgatcttttctctgcacactatagggtcgggtaacgcggttctatctgagtaggaaaagaaagtgagagtaatcgttcaatccaagagcgggaggatgagctatatcataaatgatattcagagggacaaggccatttgcatagtcacccgataatcatcttatccggagttagtgcagctagatatttcgcttgatgatgctgaagtggatgatggagacgatgccgatatcgaaggtgtagattccgatgaagatgatgattccgatgccgataaagacgattccgatgaagatgccgatgaagacggtgaagacaggtcggaagcaatacacgagctgccaaccttaaatccgttgtccaatgtacaccctgtctcgtctccattttggttatagaatttaaccatcccattttcgtttatatctatccatgcaacaggcatgatgttgtctttcgtgctgccgcatacgcccacatcgagcttggagtagtccttacggataccatgtgtaatcatgcttagatctagggtttcgtcagtactaatagtatatcggtggaaccattacgcaccagaacaatcgtctccatcaaggagaccaaaagatgatgaatgtcccgtgcagccatagttatcatcagaccatatcacgcattggcgatcataatcgataaccgtgagactgccacctaaggcggcgcgtatgtagacgctagcgagaagtaggaagatagagaaggtcatgtttcgaatatttataaggattgaaggatgatagacggattggtatctccagccttaagctattgtgaaaagtgacgaatttgtacggcatatctgcgaatttaaatgtccacacgtctcctgatacactgtgataaaccgtggcaatacgcgcgcaacacttgcgacacactttgcgacacgctttgcgacacgctttgcgacacgctttgcgacacgctttgcgacacgctttgcgacacgctttacgacacgctttacgacacgctttgcgacatgctttgcgacacactttttgaatcgaggtcccactaattcctgacttaatcttagctcctaagccagcttgcgtccctacccctgatacgtagctttgtctagacagatatgtggggtcttgacacggaccatcatctacctgtctgtggcggcatggtgctcaggtggattggggttactgctctaggagtcgcactataaactcaagtattggcgctgtcctataaattgctcgtacagtttgatgattttttagtctacagcctgatttagacatatgaaggcaggtattcttctgcattaatcttagatcacgtatcccaaagtccgttaggcttgaacgtaagttttgataatatctagcaaatactatacatgctaacatcgcctagaatgaagggaactgtcacctggttttgcgtgtcttgtcatgatattgattcccatcgcatgaagatcaaattcacaggaaacgagcctggatcctattttgtttgcgtttggtcgtatttactccctgctaagcggcgcatcaacatcaatacactatgcacaaattgcttagaggaaaccaaccttctgtcatcgaaggatcagcgagagttcatctacaagaagaaggatcaaatcatatttgaaagacgtgttgtttgggcaaagcaggagtgggacctttgggttacttctcgcgaatgccaacgcatcaacgaatctgtgcaacataatgggggcttgtgtgttcatctatttggtggtgttggtatatattagtctcatttcgagttctcaaggcggggcggatcagaaaatccgactaagggcaagattgtcagatattaggttataggaggaattggcataagaacactgtcatgagtctaagttctgtacagtacgtcccgaaaccggtgcaaccacctcactctccgcctaagggcaagattgtaagatattaggttataggaggagttggcataagaacactgttataagtctaagttctgtacagtgtgtgtttttcatttaccctgacccctcgcaaattgaaagcgatatgcaggatgttctgtacagtggaattcgaaatcagatttaactttgcactcttacgatatcattcccggacccgtagggacacactaatctaattttagctctacccctggtagagctgtatcgtactggagacgcgcgctgcgcacgctgtggccctgaaacgatttatagggaaaggccggaacaagaagtgaagtcatatttgtgttgctcgactggtacttggaattaagtgacattgacgaatcaggacgtagaaaaatttgactaatagccgcaaaatcttgaataaccatgaatcaggtgtcgtatttcgattgtgcaagtatatcggcatatgatgtcttacgtggtcgttgggaacgcctctccggaactggggtggtagtccgcgacgaggctttgatttcttcgggcgtgtctggccatgtaatttgcgcgtcttcctcatcgtcgtcaccaggcgcaattatttgagtgggatcctgggactggtacgtgataggaagggactcggtctgtggccttgcagccgatttggtgggcgtttgtgggccggctctttgagaccaacggtccacgcgcttccgtttaccagtagcgggaggagtagcgggcaactggtgattttgtgttgggagaaaatgtatatcatccgtaacgatagctaactggcgatgctcttttgtgaggccgaaaacacgaccggtcaagaaaacatgggtgttcatactcaagggtggaaagttggcccaacgctgaccatttttaaagtaagcggtgatgggaaaggtgtgattggttcgggttgaactattgtaaacagtagtctgcagacggtagtgaagaagagtgggcccgccgttagttggccaccgcgctcaataacgacaccgagaaatgtcactattggctgggcagcctcgggacagtacatgaaatacgattcgatatcttcttcattccccggatgactagattgcgtaagcttggtactgtagcagatgggacaaactgaccggtccagattgtgggcgtggaggagatatgaaattcctcgtcatcagatgaagtagtcaggaatgaaccggaggaatagacgaaagtgtttggtttgtaaaggtcggactggttgccctcattgaaaaatctgaccaaggtgagaattttatcctgcttaacatcgtctgactggatatctttccatggtagattgagcgaaacacggagttgcatggaaagccctttgccgggacgtgtaggatccggttcgacatgctcgacaaagtcccgaatatggataatagcgggaaaagttgaattggaaggcataatgttctcaggcgtatatcagacctaaagaggtggaggtgaagtatgtctgatcagtggggtttctagcgaaggctcgggagtgactgtgtgatgagaggagaagtgagtaagagagagacgtgattttgtgtttagggttattatggcgcataatccctgttgtaaacacgggcacgtatatgatatatcctagatatatctcaccactggtttgataagaatcttagtggatgaatttaggatttaggtttttgcaagccatcatttatgtatgtaagacgtgagaatgcaactcgttatgactcaacaaggttgataagagaattggtctatactattaacacgcagcgagtttcgaaaacagcttagacctcaaggcaactcactatttgtttatcggcgtgtactcggaactgtactatgatcaactacgacgtaattaataaatatatagtaatagataattcctttaattccagaccgaccgcatctttattatccggatccaacttcaacctgcatcctcgtatggacagaccgaagctgggattaattagtgatatgatacatggcgaatgtagggaacagaccatcaaagatatctggttacagcatgcgtactatcgaaatatccatattcaatagaagtgcgaatactagcgtgaacattgttttgtaattgacattgacttctcggttttcatactaagtaaagcaaccgacggccatcccccgcacaacggctgttcgccaagcacccttgacaaactgttgagcagtggttcacagctacattaggcgatcttctcagttgtgttcaagtagaagactggagttcgatgatgagcctctcgatgcgttgacgaatttcgtgacggatagtccgtacagcatctaacccttgcccggcggggtcattgagttgccaatcgaggtagcgtttgccagcgaagaaggggcagacatcgccacagcccatggtaatgaccacatcgctgtcttggactgcatcggcagtgagaatcttgggtttttggttgctgaggtcgatgccctcttcgcgcatagcttcgacaacgactggattgatggagtcggctggggccgatccggcagagcggacttcaatggtgtcaccagccagatgcatgagatagccggcggccatttgggagcgaccagcgttgtgaacgcagacgaacaatacactaggcttagccatgatgtgcctttgggatcgattgggcggtcgttgtggaacagctcgttggaagagcgactcggttgttaaagtagtccgcaattgactggtacaggtggcaaacgtctcttcaggtaattatgaaacgagaaaagcttcataagcggtgtctcaattcccgtataagtaatgtgcgagagactgaatggaggcagcgcgtggggtttatataacaagtaacagcttgtgagagagggaactcaacaatccgttgatctagaacattctctatctagcagaaaaaggcagacttgtgtaatatctcattcactagcggctgttgccccacagtttatcaaagcgttgattgagaatctgtgatatagtcacagtatgtgcaatgtcacatcctgccggcattgccggattagaaatcaatacctggccatagcctcagatcctgagcactaagtgcaatttagactggcagcaagcaggccttattctattacgtgacgagaggacactgctatcgaatcctattccaacacgggcgaagttctgtaccagccatagacatgtcactcgaacaatatgactggtcaaagtttgtaagaaacacagagactgcattctatccaaaatgcgtgcggaacatcgaacaagttcgagcctcgaaatcttacatgccaatgacaaagcaagagtcgccaagaacttttgctgtatgtcactcccttgtgctgattggctaagcgtaataaagtgtcactcgtctagtttgattggccaccaaaatgccctttccgagttaatttggattagtgtcgcccttcaaggcaagaaatcaaaatctatatatattgcagacgactctagctaacaagggtttgtgcaaatcactagcgtacgttttgattttccttcgaaatatccattgaggacaatactttcgcagattccaagccatcatatcttattcggagctggatatggcagccccaacaggtctgcacccgacgaaggaatcggaatatcataactcaatactgcatagccagccgccaactcctactgctgaggatgtcgaaaagcaagaatcggaagagtctacagccaagcaatcagccttcaaaggtcttggctggttagatcgttttctcgccttgtggatcttccttgccatggccgtcggaattatcctaggcaactttgttgaaaacacgggtcctgctctccaaaaagggaaattcgtgggggtttccatcccaatcggtatgtgcgcgtgaactgtgaatttacaaggccttggctaaccggtgcaagcaattggtctcttggtcatgatgtatcctattctttgcaaagtacgatacgaatctttgcaccatgtattccgagagcgtggggtctggattcaaattgggttcagcatcttcatcaattggattattgcccctttactgatggtgagactaatcccactcctcatggtgatgtgtactgatatgatccagcttgcactagcatgggctttcctaccggacgagccagaacttcgggaggggttgattctcgttggattagccagatgcatcgctatggtaagttacccctttctttgtttatgttgtaccggattcagagactaattgatcatgataataggttcttatctggaccggtctcgctggcggtgataatgaatattgcgctattcttgttgcagtaaattcactgctccagatggtgctcttcgctcccttggcaatcctcttcattaaggtcattggccactcgggcagtcaagttacactctcatattctaccgctgccaaaagcgtggcggtgttccttggcattccattaggtgccgcaatcattacccgcattgtacttcgaaagataactagcccacgttggtacgaccaggttttcctgaagtgggctggcccgtggtcccttattgggcttctttttacgatccttgtgttgttcgcatctcagggccgccaggtggttcatcagattgtatcggtcgttcgagttgccgctccgctcatcgtttattttatcgtcgtcttcttcatcactcttcttgtgacttacaagctcgggttcggttacaagttgtctgctactcaaagtttcactgctgccagcaataatttcgagcttgctattgctgtcgctgtcgcaacatttggtgccaacagcaatcaggcgcttgccgccactgtcgggccattgattgaggttccagtactgcttggccttgtctatgttgccaaattcatagctaagcgagctggctggaaagactgaatcgaaaaataagaggaaatttgcgacttaggctaggctatgttgaagcgaggggaccgatctcgaggcgtacagataggcaatgaacttaacagtaatagaaataatcataatttagtggtcaaaatttgtctagatcaggctgaacatacgccatacgacttcccgggtgataagcccgatctgtagtttgaagtgtcaatggatctctaggtgacttctgagttaagataattatgagactccgttgtttaacgcgtggatagcgtacatactgaggccgaccgtactatagccgataataggagtatccctttagaagatgtaccctttcgtaagtaaaaagggaggtatttgattgggaagagagggggaggggggcggaattctaaggcaaacccccatccaataaagttcattgagtgaccaccggaacacactattcccccgcagaaatttggtggcggtctacatcctagctcaaagcattgcttattaaacaaaatatggagaagctcccgaatcagcacagcccagccgagccgagtcttttatgtcacaactacaaggtaactggttacctcaatatgtctaagtcggtcccccgaagacatttccaaatcgtctgtagtccagtccctagagctcgagaaattaagtttgcctaaagcttttgtgtctgttagattcatctgtccctttcctcccccctttttttcaccaggccacaaaagactcttgatatccatcatccatcgatcgtctggcctgattaattaggtattatgtgctttaggtggatacaacaccaatttcaaagttgaaaccccggtacatctgagctattcagctattaacaagagcacgaagatcttttccagcatgagcccctggttatcgttgttggcattaacacaacccgctgctgtagatgattgttcttcagccactaataccattactaaaacgacatcttctgttccgaacccgttattgccatgctcatgctatatttctattcttatgtcggacaacattcagcgcagaagtcaagacgacgtccactcaccaaatggacctctagtgcatcggttgtactcaaaactgaacctttcgcagccggggcgacggtggcatcccagatctgatgtcaagttgctgcctgcgaagtacgaattgactgaaccgtctgatttggtggtgcttatctcgagcatgctcaagaaattgattcagataaacgacaaaatgtcactgggccagggtcaacaaactaggtttcactctcgtactgcgccccaagtttccgtgtacaattaccttcagcggttggctacgcacgccaaactcccgtctgcgatacttctcagcatggtctattacatggatcggctctgcatgttatatcctgctttcacggtttccagtctgacgattcatcgattcctagttgtcagtgcaacagtcgccagcaaaggcctgagcgacagcttttggaccaacaagacatacgctcgaataggcggaatcagcacgatggaactgggcatgctagagcttgaatttttgttcaggatggaatggaaaattgttccaaagccagaggtgctggttgactactaccggtatctcgtcgatcggtgtgagagcttcaagatcgatgatccgagttccgactctagcaccgcgtcagtgttgagataatccacccacgtgatatcggcaggggaggggataagttctgttcctaagagatttattcttaaataagggccattaaagagtcggccgcggctgggtcacaataccagcatggatggaggattacaccgcgtctggttggctacagcaatttttttgctttggttaaggttactcgtcgtaggagataatgagatagaaggctaaagtacgacatttgaaaagcatagtttcacagtaagggactatacagttctttactctatcgtccactattcacaaactgtcttaaatcataactgcctgagaatccctcttcgaatttttcaatcttttcccgcctggttcgctgaaatgatcagcaagaaaattagatgtgggcccgcaccaatattgtatatttaacaaagtcctcgaaacagtcaacggttgccaataggcatgagccgctcatccggattgaccttcatccggaatgggtgtacgactccgtaattgagaatgatttgtgatggtaacatacgcatccagccaccgaggatactaaagcagttaacagccttaaacaattgtgatccaccacacatctggggcaatggcgagcattcggccttgagttggacaagcgcttgcagtgcttaaaggaatccaattaatgcatcgctatggtaaggtacccctttctatgctgtcggactaattattcatgatgatagatcgtattgtctagctttactgcatctgccagagattcatgtctatcacctatccaatatgtcgaaaatggacatatttttcaccatgcaatttggttctgaatcacatccaagttcggatcggacatcacgaaggtctgaatgatttcgtatactttcgataaggcttgctgcagccacgcacgatgtaaattgacctgtatcctgaacaccgccaaagtgctctgattcagggacagtttcgcctatgacagaaacgagctcgactgctcgccctgcacttgattcttggatattggaggcatctatgctggtcattgcatctgatctagacggtgaagacctcatctcaagagtcttaagcggatgcgatgagttgttcaccttcaaaggagttgccaatgaatgatggtgatccacggaagtttggccgtgggccgtcggcaagtgcaattttgctgatggtagggagaccactggtggaaactgagaacggatagagcttgctgtttgtctttgagattccaagtattcttcgatttgtgtttcggtgacaccatggatcagcagcagggatcggagagaaacgttttctgctgcgacttttcttcctgctttttgaacctcctgtgtcgccgctacgccaagcctttcatatgaccttaattgttgctcaagttgttgggtgtattccttgcgccgtgtgcgagaacgccgttgattttcgcggattcgagcggatgatacatcacacttctccatattgacagctttctttcccttcatccctgtgctcgtaaatgggaatgcaagtggtgaaggtacagatttgggggtataggggaactcttagaagtctgaagatatggtcaagctgaaacggaactcagtggcgacttttagtcattcttctaactagcctaaccctgaaaataactatccagcccgggtggggcaaaaaacatattatccgggaatctatttttaatattattgtccaatcacatttagttaatgacatacttcctccctttggggaagttttactatacaactgcacgtataggcaactttctgactgtcttgcctttttgttacctttgccacctaccttcgcgagtgtaacctatgctatcttactttatacaaagagcgccatcgacttttaggccggcaattccatcatccctgctgcaccctacatattcagcaaggatatcttccgctgttcctcaacaagtgattgcgaacacccgccaaatcgatgtctcatatcgaactctagagttacgtccaagtgaagatagccgagatatccgccagaagtatcggccattcatccttagcgacgatgcaactgaagactgggtcaataacttagacttgactactgcaatggacatggctgaacttgacctgcagcttacaaacaagaggctgagggttctggtactttatggcagtcttcggagaaggtcatattcgcggctagtggcactggaagcttgccgtatccttttccggctcggctgtgatgtgcgtatctttgatcctgaaggtcttccggtaaagaacgacaacgataccgatcatcctaaagtacaggagctccgagagcttagtgtgtggagtgatagacatgtctgggtctcgcctgagcaacacggaaacttagtgagtgacctttcgcgagtgttctaatactcagtgcagtaattactgactcgttctatccccagaccgctgtattcaagaaccagatcgactggattcctttgacgactggaagtgtccgtcctacccaaggccgaacgctggccattgcccaagtgtgcggtggatcccaatcgtttaatgccgttaactctttgcgtatcctgggtcggtggatgcgcatgtttaccattccaaatcagtcctcgatccccagggcatatacgcaatttccggatgaaggtcaaccagaagatcaacgactcatgcctagtggcaaccgagatcgtctcgtggattgcatggaggaattcgtcaaatacacgattctgatgcggcctcatatcggtcttttcggtgatcgctttagcgaacgggaggagaagaaagcaaaggaggaaaagatgaatgctgctgcagccagataagagatatagagcattatagacaatgcctgggagacaatatcttataaaacgattcttcagcatagtgaagtagagttggcccgtcgtttaggtgaccaccccgctcaagaacgacgccgaggaaagtaactattggctgggcagctctgggacagtgcataaagtatgaggctgtatcttcctgattaccagggtgactagactatataagcatgtaactggaatagagaaggcaatgccgatccaaattgtgagcgtgaagaacaatatgaaacctttcatcctcagacgaggttgtaatacaaaagcatttggttgataaagatcaggccggttgccctcattaaagaacctaaataaggctggtaatttcattctgttcaacatcgtctgaatgaacatcctggcttggtatattgggtgaaacacgtagttgtatggaaagccctttaccggggcgtgttggatccggttaacattattgaggacgtgaagaatggcgggaaaggatttatttgatggcatatcgaaagtagatatatacagaatagtgtgggctccaattatctagggggataaaaagaaacgaataaagtagacatagttgtggtgaagcatatcaggcgcagatacgagcgaaaatgtgatgagtctaaacttcctgaccgcttcttcgagaggttattacgacatataggacaggagtctactcatacaaatgcatgtaagacgtggaaaaagatgattggatatttggccacttagttttaagaatttgtctgccacgtaccaagagtagggacgcattggagagtagggacgcactggagagtagggacacaccagagagtagggacgcactggagagtagggacgctctagaaagtagggacgcactggagagtagggacgcactagaaagtagggacacaccagagagtagggacgcactggagagtagggacgcactagagagtagggacgcactggagagtagggacacaccagagagtagggacgcaccagagagtagggacgcactagagagtagggacacaccagagagtagggacgcactggagagtaaggacgcactagagagtagggacacactggagagtggggacacactggagagtagggacgcactggagagtagggacacaccagagagtagggacgcaccagagagtagggacgcactagagagtagggacacaccagagagtagggacgcactggagagtaaggacgcactagagagtagggacacactggagagtggggacacactggagagtagggacgcactggagagtagggacacaccagagagtagggacgcaccagagagtagggacgcactagagagtagggacacaccagagagtagggacgcactggagagtaaggacgcactagagagtagggacacactggagagtggggacacactggagagtagggacgcactggagagtagggacacaccagagagtagggacgcaccagagagtagggacgcactagagagtagggacacaccagagagtagggacgcactggagagtaaggacgcactagagagtagggacacactggagagtggggacacactggagagtagggacgcactggagagtagggacacaccagagagtagggacgcaccagagagtagggacgcactagagagtagggacacaccagagagtagggacgcactggagagtaaggacgcactagagagtagggacacactggagagtggggacacactggagagtagggacgcactggagagtagggacacaccagagagtagggacgcaccagagagtagggacgcactagagagtagggacacaccagagagtagggacgcactggagagtaaggacgcactagagagtagggacacactggagagtggggacacactggagagtagggacgcactggagagtagggacacaccagagagtagggacgcaccagagagtagggacgcactagagagtagggacacaccagagagtagggacgcactggagagtaaggacgcactagagagtagggacacactggagagtggggacacactggagagtagggacgcactggagagtagggacacaccagagagtagggacgcaccagagagtagggtatcagggatgcgcaatcataaagttacagtatcttagatataaagagtataacctcacgggaacccgagagatcgccgagaaaaatgtggagaaactttttaggatatttgaaatcgaaggctgtggtaacctagagcctaagcacagagttaccgcgactattaatcaggaggtcctaagaaaagcacttacaaaatcaaatctcaccctagaagcacttatcgatctaaaaaatcagccaaatctcctattagaaggagaggatatcattacttgtatatataggaaatattgtctaaaagctggcgagagatttggagaaactatgtgactggttgatctttatctaaatagtagggcagtattaaaaaatatcgaatagagactaataacgttatagatatctcgatcgatatactcgcctaattgcgcgaagaatcgatataaagtataagctttactattagcgaaatatatcgtacccttaggttataccaaatttcacaaaaccctacttaagagtagaaatagtgggctagacttggttccaaagactattgtaaacaaatacgatgcttataatataacgattaacggcgttgtattttagacaagttattactatacgttaggctatagaagccactacgatcttcctaaattaccaggatattaggtctaaaatgcctagaggtatatttaataattgtatgcctcgtatatagctaacttcctagatactgaactattatctatatatagtcctaaaaatatagataaaatttcttaaatcttaggataggtggcttatcgactcagattctatgtcctatattaaaggattaatacctagtatcgctatagtagaccgaaaatgtattactaatcttatagatttaaaaaagatatttcctcttcttagaataacttaatatagggaagtccttaagagtcactttctctaaatacctaggagaatattatctcttactacacttatctaagatatactgtttattaagagactagtaagagcgctctattatctctatcctctaaaatttaaataaagcctttgaaaagttatacttatttaatagaatcttatcggaactagaggtctccttaaagtctagataacagaacacgagtttataacgttataataaactgaatacccgttcgttatatctatactatagctttagctttttacttataggtattttgtctactaaggaggctgtataagaaattttcgataacaatttgaatattttactatagatatgagcctgagtaagcttgctatattggcttcgcgattaggctttaagttggactaaattaggtagctttaaagtagaaatttagggtaatatatggtataaggcttttttgaatcacttagtagggaggagttctataaatataaagagcgaaaggtataattgatattaaatagactttagaatatattacagaaccttcctaggtatctggcggaggataatagtatagcctgatttataacaaatgacctagaacttaaagtaagctaccgatttaatagcctagtataagataagtatctatagtagtatagaaacattttttataatcaaatctttggtcctaattagccaccgttagaatatataacgtcgctcggtatggtaaaagatattattagattattctttagtaaaagtttattttttcagctaattttggatgaatgataagctacccctatctaaagtcctataaggcttactgagactgtgctaggatctatcgatactaatatggattttaaagagtggcatctataagttcaacctataaatctatcgccttcggaagtaccctaacccttaataaactctggactagagttggtagaggaagatactagtaagctaatagagttggctaatcacctaagtggaactcctgattgtgatactctaccgttagcagctggtttcgaggaaacgtcttaactaatagaaacgaaaaactacctatccgttcgaaataaggtacctgagatccttttaacgtggtatcgattatattaagaagtgatcgttttatacctattcgaatcacaagtctattacaaattcttcttgggtggtggatttaacctacgagcagtcttacaagatctggtaagtgatcatctctttatagtgattaatgagtatagaataggcactctggatatgaataaggtatataaagcagctttgaaagaacggttgatacttatcgggaaaatagataatccaagttatggaaatgacatggaagggacgattttattggataaactccgtgattacgttctagactatgatgttcatataggaaagagaaaggcagattctacagacaatcgatcgagaaagcgtcatcaggacacggtacctgataaggagttataaggaataaaactgttttcttgttcttcaatcaatttttcatctcatggaggatattactccctccgccacttatctgcactgttacacccccttttagtctaataatgagcttcactcttatctgaaggattacgcctctaagcagacagcggcagtagttgacgacaccatagtggcgtactacgtagcacacctagtgggtactgcgacggatgctttacccccagatttgcctataataaattccgaagtacagaatatagacccctttatgctgtggatgatcctcctggtgaacaatgtaggacacaaaaatagcaccacaaatatttttttggctttctatcacttcaattgtagtcccgacggacgaagttctatttcgtttgcacatttggtagccccgacaggtagagatttgcgaacgtagtaattaatattcttctcagctcctcatattcctaatagctaatttgttggggtgtattatatccaacacatcccatcaaggtgaacgtcattgacacgtttgccaatgcggattcctaaaggaaatgcctggtggtaatgacgctttaaactccaacatccccctgggtttgccagatgaagaaactcttcctttcgatctattattatgcattcacgtcttcagtttaaatgatactgacctttagtagatcctctgcggaactagaagtattcgccttctcgacaaacgactgcgccaacttagaaagagacggcatacccaggccttgcttagggtcgcctacatgagttggtcggtcacttaatgaagtcacgatagacccaatagcctcgatgtcttctttgatgccgtcgcgcgatcttctcttcattaaacactcccctatatttgctgtctaatggtcagagttggtcatcatattcatcaagtcccatacctatcttgacttcgcctttcgatatgagaagtatattgctacaatccaacaagggacaagaggtcttcaactcgtagtggataaaaataacccctctaaggatctccttgcagatagttgctatatctgcttcactgaagcgaacattcgttgctacacaaccaaggctaatagccaaatgatgatattcgtatacgatgtagaacttccctccagattgaaagccttctatcaaacacaccaagttttggtgcatgacagattgaagtcgtctaaaagcgtgggtgttttgaatgctacactgcttaagaaagcaggtaggtaggttctcagtgtctttgagccctatcacgcctgggcctgcctggtcaatgttgtaagatagatggtactgtgccggtgattccactttaacagttgatgagctgttgatattttcagttggaatgatagggaccccaagtcgatacgcataattattttggaccaatttctcattgggtttctcgatttcggtactttccttgacgatacttccattgtcgggccacagtttctcaggaaattgagtttcgcgcttctcccgattcaaattggatgccattctgaactggttgtgaaagtggaaatataatattaacactttacatccgaagtgctgtccttgtttatatatttaaggattatatttcgatgactaatactcgccttgggcaccctgcattcgcggatatattttcagtgtcgcagggtggagatttagtaaatactttaaagttacgatcggctaaattgcccgcatatctccagcatttattgatgtgttaggcaccggacgtgcagctaaatatggttgaaggtagctggtcggtaaattttctcgatgtaagtgattttatacaaatctagtattttagctgagagactaaattgaagaacactcttttctattccaccgtatttaagtacttagattttggccaacaaagtaactatatattcatgggaattccttctctgcgctttcgcaatgcctaatattgtacattaccctgttctctagcgtctttacattcgtttcgttttctcacagcctaaggaaggcgcgtaagcttccagtttgaccccaaggctggaactcaggttcgaatagctcaacattcttatctacgcgtgacctaaccaagttcctgatatcataccgagtttgtgtttatatatatactggtttgagataagagggcgtttcataatgaagggagagaataaggcttacctaggataatcattttccctatttgatttcctatctctatatcaagctgctcttcctagctaacgcgtccactgtgtatatcgataagcctattcttaccaatatgctgaattttattttctaagtgagtatatagtagatcgtaaattgagatataaagtatctgcttagtgtaagtagatagtattgctaatatagaaatgggtacaaatgtatccattatcttacctaataagggtctagagtaggtctcgtatactcttataattactaaccctatctaactgctagataagcgagattacctatatatatacttaagcctttttatagctatcgagaagctccttaatatatagtaattgagccgcaatgccgataccggtagtaattataaaagtatatctatagttaccgatattataatttaatctctaactaacagataatagactaaaagggctattaatctaggccctatattctctgtttagcttaatataatcgaagagtctctttataaaactagaacgaggacgaagtaagattaagattaaaaccacctagctattaatattattttcctactagctgatagtaaaagggtgtgattaaaaaatataaaagattcctatagaaggaactcctaggttaatatattgactagcgcgtacgacctacagtctaggtaataatagtattattcgagtaatattacctatatagggttgtagatttatttatatatagctttttcctatcactatattgcgatagataatatgaattagctgtaaaacccctataataacgaaggtatatataaatactagtaggaatacctaaaaattccctttagccgaccggatatactactatactctatagattatcgttactatatatctaatataggtaataaggaatacttcgtaaacccttttctttactaatagtaatactactaaagctaaaaatatactagcggccttactaattttagtatctatttaaactttaggagctctaggaaaacttactaggagaccgtagaattatatcttatttacctaagatattgcccttaattaagtaacgattataatataagttagagctttaactagagctactagcgcaaataatcgataaaggaatctataggaatagaaggaaattctaagaagataagcgctaaacttataactactacctaaaaacattggaaataagttaataagtaagagcttcgctgccctcttactagtatcttaaacggaatggacccgtataatattgtagacactagtgctggtaaaataaagaactattaatattaaatgggttcttgatgtacgtctaagaccggcgaagtgctagtaggattgggtataaattatatggtgtaatagaaacggtcgaatataagaagataagaaaggagaggttgataagaatgagaatgtatataatgtaagacggtataatataaatgagagagttataagaccgaggactacgctgtagattgcctctggtattgttagaaaacgagtgatggtaaaataagttatttcagtgaaaagtccagaaatttatttatctactttggcatgtactagggttggatttataggtctttatcttcctatttgcttctttcctggcggtacttaagaatcataatacagcgggccttagccagttatgattggtagaaaatcaagtgtataatcaaatccctgtacccctaagttgtaatggtgctagcttgggctagttcctgtcttagctttttgtggggcgagaagtggagaaagtccgcgacgctacttttgtgtccgcgattctactttcgtgcccgcgactctactttcgtgtctgcgactctactcttgtgtctgcggctctacttttgtgtctgcggctgtacttttgtttccgcgaccctacttgcgtctgtgtaattctgccgttttcgagcgcctagagctttagcctacttcttaaggatgaacgtgaaattaaccttaccatagtactcactagcccattcctactgtggcttcggaaatcatcgataactctggacaaaatgtaattcgcttataccctaggcaaatggcctatgtctgctggagagctattataataaagataaagtaggccagcatgccctctttgccatcggtgggagaaaaaaaaagccttagctaatcttactatggtgaagatgtcttaacctaatgggttaaatagttccttcctaatagctaccgctgagaatgatcctagctgcgaattggaaagtctcagctataataggtatattcctaagatataagtttttctatcatactttctactaagatcttgatgttaaaatcctatctaggtatggtttaccctaccttgggcatccttcctaaaagtattctttgaattggaagattaatcaggctggttatagatggctaagccttagtaactactttgggtactcaaccgtcttgattaaaagaagagatgccggtagatagggcgctagcttctctaaactgtaagttatattatatgaaaatgtagtgggcctagtggaggctttctatgatggtatatctacttactttatttataattactatggtttcgctgttaatcttatataagtcggcttaactcctactttagaattaagtgagaaagatctggcgagtatctatagaagtgttcttaggggccttaaatatatctatgagtagctctatatagtctacgggggcgtcaactatgataatattatcctatgctccgatagagctattaagataggtaagttatatataatattatcctttatagatagaatactaagcctactagtaaatattggggatagtatgattaatgatggtcctatgtctatggatcttgatcgtgaaaatattggcttactattactttaattaggtgatttatatagatatatgaaaaatcctgaaaaaatccctggaaaagctgcctataggctgttgaagtatacagctcactttatagagtatattggcttatcattatatttatatatatttgaggttcggctactatttaatatcatttagtctcacactaataacatatagcatacattcttttagcaagtggaatcagacagtcggacttagtatcttatacctcattatctggatacaatcatatactgggggtttatgacacaagaaacggagacctgagcgagactatggttctctttctaattcatcacttgcagccaaggcagaaaattgtaggactctcgttgttaccaagctttttgctattagttgaatacagtttgtactagagaatttgatgccatgccttatcctttacacattcctagccgttacccctgggataacataatatagaggaagattaactcttagacatagaggggttgtttgttgcgaaacatcagattatattcttatttcaatctctctagtttaccaaatttataaataaatagtaaaatgagggagtaggcaacggataggctaaaggtaatcacagtcaaaagcactatgatagaccaatcgccattataagtagtatataggctgataattgtagcgagaaagccagctaaggtattaagaagcgtaggactagtataattagggaagttcttatataatgaatagataatacttatataaagattcgattggtaagctaaatataattcccccgatattcctagaatagccagcttataatagccaagcctgatataaacagtatatatactgttgcgagaaggggaggattctgaatagtatttaaaatccactcccctactttattatcagtgaggctattatagatggtatcggacttttggagagatgtgaacgttctaggtattataagatatctagtaagaagtatccagtgtactgtactagtaagaacgttgtcttgctaggaaattccgtccgcttctatgattatccgcatgtaactggattcgaagggctcgtaagtcgaaccaatgacttgagtatccggatgactaggggactgagtcgccatgttcgtatttgtaagctagataggctgtaaaatggagggtagcctttggtccttaagaaaacctgcgacatctaaaacagctcgcaagagattatgtcaactggagcttgacttattttcacaaaagcaaagtataatctgacgcaaagggtacgcaccatctattctcccctctacattgtactaactttcgttccgcttgattgaattagtaaataaacggtgaaggtaggatcttccgagtaactacaaaatcttagcagatattttgtcgcattataaaaggaagtatattctattaatcacattcaccagacttgatctgtagagcctctttatcagcaataacatttgctgggtctatatccctatagagatcttctaataatcgaaaatgctccaatctggtggcgaaatatcgagtaagccgagataaattactctcggggctttccggcaggccttctattttgctgaaatttgttcgttctagattgggatactgctgttcctactagtctcttagcttaatggcgccgaaaccctaagcctctttaggcattgtgttacttactagctgtttatcattagggggccacgatctatcctcgactgagttatagataaacgacccttactgatgattgaagaccaggtagatatctgtattatagaacttggtaagcttataagctttagcttttaatgtctgggactgccttatgaatttaactcgggagttcctgtaaggatcggggccacctatgactttaatatcatttagtaaaagaatctagaataaggaaaggggtaacgaaactttataagttatagaagttataagtttttactatagacaaaaaaggacttgtatttatacctaagagtttctttatcgaatatactataaatacattctaggtttaatcctagtttaaataagtgcgcgtttcctgggataaatatctctagagcctcttaattcgcgcttatatctcctacccctaataggatttcggatcacgtcacagctctggtaaggttatcggtaggaatacctatagttgtcttaactaaacgaagaccataggccttattataaaataaacgatattatactctctaggaagccgctaatcctttagtgccttttagagctagtctataaatatatatttaccttatactctagatagtgggctaagaaagtaacggagcggctgtagtatctatataaggggtagagactatctagacccctaaacctatcgattaatctataatctaagatatagctaagcctattagggtagagattttctaaagctaagattactatctaagccggccctttataatatactaatccgcgatactagaatagagttacggtattttctagtaataagtcgataataaagaagaatctagagataagtagtgtagttactatatcctaggctattcgtctactactaatatagaggataataagatcgcgatagtcctctatagccttaatagcgttaatagtataaggtatatttcctaaaggtatatctaggcggtaactattacttttaatagaattatctagatagcttcgctattttctctaatcgctatctgtctctatagttaatatctatatatcaaatccccggtatacaaaactattataaaagatatagtagaaatatagggtttacttattagactgcgcttttctagtacctaataatagtattcttatagaccctatagctataggctagatttagtatgagacctaatatataatctctcttataaagttatactttagtctactgtcctagaaggaaccgattccctatagatccgctagcgtaaaaaaacttataacctaatggttagccctacttgtataaaataatatataagatcgacttataatagagccgcggcggtagctcttactctagattttagttagcgcttaactatagaaaatagggtatatactaagcttaggcctatattcgctatatagttagtttattttaagtattatatagatatattatttagaagtctagttatattagtaaaaacataggtagatataattattaaacttgctatttttattccctaaatcattggctacattgaagttacctattataaaagtacttatatccctggaaatgcttgtggttactaccctgacctttgggctggagtatcgtggtcctagtagatcttcttaagtagtactaaaaatataataatactctctaaaggtactttttagggcagtatcgaagacctgtgaatcatagcagctattatataggagctatttaacctatttagctatatccctaaagatggatataaatctaaatacttagcgaagtagtagaggtaagatagaggggtgtcttttatagaaaatacgatataccaaggtattgaatcgctccgagtaatatgtaatgtcctatattattataaataaactaagggcaataaggctacctataatatcctttattaggtttcctgattctaaaaaactatatttatactataaggttactaatttacctaaacttatactaagtataagatctactatatcttatattatatataggtatagatattcctatactaaaagtaggaactctaatagaattaccccccttattctactactattaatagtaaggattatagggcttatagtcggtagaagaatatctactactaatagcctctagtagaggtaataaagatagcccttaattataaactaatactctagcctaggggtagggtttccgaaaacctaagtatagcggttatatactatatatctatatactagaatatattatatagaacgcagaaggtagactagataaatacaattgctttgtatataatataactaactactaaaagacttaagttcttctttatataaattcgctaaggagactgtattctctaagaatcgcttatataagtgtgaaaaataaaacttaactagatcagtttcttttataggatatacattaggctatagtaccttagaacagcgatatattataataataatagaccaatataaagttctaaatactatataggggttaatgactttctaatattagctttagcctatgaaatattaagataggactaactaagtatcttaggtatatagtagtctataaaaagtgtagacgaaattgtggtagctaatctagagagagagagattggtatagtagctagtcttaagataatacgctaaatatagctctatatataaactaatagggcgatccttccttatagcttttataaaatcgaacggataagaaatatcctttagtatatattagattactgcttgaaataatgctattaaatacatcctattcagctaagcttagttttcttattaaatagaggaaatggtatcgatctattctgtgattaatactttgatttattagaatcttatgatattagagaaattattatcttataggtataaagatatagagctagagaataatccagatagattgttatatctactttcttagattttccggtagagtaatcctatactaggcatacccctctcttcttttattatagatacgctatgaataaatattacccttagtaaatattgtgataaaaaggaggatatagaataaagctataaatagctgataagaaagtatatgacctttttaagataggcagtattattaataaagatataaactatatctataaagataaatattaactgtaaccatagtactagcagtattttagccgctaaatagttattctaaggaatgggatggctaacgctagtattaagtctctttatagggtataatttattggtatttaggatattactattagctaataatactggccggcggctttacaaagaagcgatattatatcgcagttttattagagcctcagatttatacctttttatattattcagaggatagagctattaaagagtgtgattcttggttttcctgctaaggaatatatataatgatggatattggttatcttagttatataacttagagaccacacatcgcagccggctgttatcctagattgtaagtgtggaatcttcctaggtgctaacatcaagccagccaatatctatcgagttttacattgtgaagtaaaaataaagaatctacgtctcttatgccttacggtacgaaatatttatatataaatattactccttcatatgacggacgtgtttcataactagggtgataatatagcccatatttacagtaaataaccaaacaacctcgttctcacctcatcttcaccccagtcctcacctcattctcacctcgttctcaccctgacccacatttactggtatagatcccagactacgtacttttgtcaaggccagctctcgcctccccaagtccaagaggcaaaagtcaaatagggataacaacaacagggtactataaccaataaaaagctcccattaaccaacagttggtggccctatcctagtcattagaagtctggcgcttaagagcagagctagatataagacccatctgcagcgtccgagactaatttttattttactaccttgccctaaacatatctaattacaagcacgatcatgactacgaagcgtctctggcactcaatgtcccagatagtccgtgggagacccataatccctttctttatcttggcaccaacgaaaacatatattatatacaagcagatattaacttatataatatattaagtactttcgttcagcagcaggatatgattatggggaatgacggttttgagtctaaagcgtgcccggaatcgtctagggtctcttcaatgacagagttatacaggggtgggtacgagtatgggataaggtatccttccccccatgataggtcccaactagagctgacaaactagcagccaagctgatgcattattatcctcatcttcaagttgtccacaaggccccggggagattgagactatctcgcatacagatgaagccctatctgtcactctgaagcgatttacgagtacgataaatcaattcggtgcactttcgcaaacgcttggtaacaagatcgaaggcctaaatagccgcttcgacgatatggagcgccgtctggacagtatggagaaccgcatggacagtatgaagcagagcatggacagtatgaagcacagcatggataatttgtctcaggaaacggaaagcttggaggccaagttcaaatctgtcaatgagtatctgctcgaggtcataaggcgggaacagagggtaatgaaggaatttagtaacttagtaagtcactactaagagtaagaaatataacaggttacctagcacattgcaaattctataatatgcgttggtattttctgaaagagatgaaaagaagcccaacactataataagacagcactcggtagattccacagcttaagttccttcacgtccaacccataacctgaaacatttgacaagtcaaaaacagcccccagctccacttctagaattggatccccaaagcattaggtattgctgctccgactcgtgcaggcgcgcggttgcctgtgtgagggcgtcttctagggagctgaagatatcaaacacccgttcttggaactgcaagagtatctgtttggtctctttatgccactgaagctctgctctgagatagcccatctcataagcagtttcttccaactgggtcttgaaatctggcgattgtcgctttacacattgcaaccgggactgtagtctctcgaggttagacgatgtgcctccaagacatagaatttgatggtccacgggagtaatctcctcggatatgggatcgagacgttggccagtatatcgactcattgtatttgataaaaaatgcaatcaggactatagataaagagtttcgccctttaggttggtacagaaatattaaagagatcaaaggaggcttacagcgggaggcaatgccattcctaaaaggacgatattgacaatgccctctatcaccccttaacgcaagcggaggtgataattgacagggcaatataacgccacctacgacacaaaatatgcctcaacgtatatgccagtgcatcgatttcaatacccgcctaggttccccactctatagctgtatagatttagattaatttcaccacgtgattttatccaataatatgcgagtgttatagttaggatcgacaaatgaaaatacctccatagatgcacaacagcaacggctttatcgatagatacaaggatagcaaccaaactatcactttcttgatattagaaaagaagagatgatttacagttgacttatcaatcaggccgacacagtgtaactagccggaattttgggcctcatttacaggcgtcataaggcacgcaatatcgttcgttgccgtgcacatccgtatatccacctcgcaccaacccatggcgcaccgcgcttgccaagacctgcgagtctctccgtgcgacagtaaaaacaagatacgacactgaaaacgacaaaagacttacaacactgaagacaacttgcgacactaaaaacaacttacgacactgaaaacaacttgcgacaccgaccaattcctgcgacactgaatgctgtaaataccatggttagctgtgtatcgtcacaccctacattgtttagccactaataaaggaaacgagccctcaggtctttattatatgataaaggccaagccaattcttcaagacatatcttctaaagcccaatatcaaaatccagtggtagctccgccatctactactgccattcttcgagtaaagccgactttttatccacagtagatataacatttgctgattctgtttcaaaaatctaggacaatacaaacaccgcaaaatataacaatgacgtctttgtcttggtagagaagctgttacaccaagaccagtagtcaaagcattaccaggggctcttggagctcaggatcaacagcaattccgtggcattccgcagtatatatgacatttgctgattctgtttcaaaaatctaggacgataccaacaccgcaaaatatgacgataacgtctttgtcttggtagagaagctgttgcgccaagaccagcagtcaaagcattaccaggggctcttggagctcaggatcaacagcgattccgtggcatatcaaaaattacatgtctattgcgaaaggtcgctttctgggatgcagcatcaaaaatcgcagcttgaggcttcactacgtcatgccacggaaacctgtcaagcgttgtcccaaagccttcacttagaaagggacaaagtgcgagggctcgagtcccgtctcaatgagttgtacccagctgttaattcatggctacagcgattgagtcaatacaagcaggagtccggatgtgtcggtgatgagggaacaatggagcgctttctgctagagaaccaacgtcagcgagagttgatcaattgtcttcagtctctcctccacgcacgtgaacaggctgtgcaagaccttcaggctactctagaccagttgtctcaacaacccctcaaagggaacgcaggtcaaggtgggctatttaggtcctctgtttgttcgtcggaagaatcgaatgtcgaaatcatcacggatacaccttccaccaagggctgaggtattagacaaaggattttgcgtgctgcgccaggttcctcaatttcatttcctccgagtttacataagaatattcttttccgtcactagtaactagcctaagtaaaggtctcaaccaaaaacgagtgctgcgtctgtagcgctatatatacacctctggatgcgaagggaccacatctcgagtcagttcgtggtagacaaagttgtggcgttcaacattccgtgttccccgaaagtgaaactaggacagatcaggcagccttatagcgatcactacctaaacgaagatcactacctaaatggaggaccagaagctgccggcccattccgaacctttcattacaatgacgtcctgcctccaaccattccccggcacattggatggtagatcaaatgttaagaaataaatctttctttcgcctccttttcttcctgggcttttccctgttcctcaaagaaactcaatcatggtgacataagctgtatgcatgcatatcactaagacggatcgaaccgctcgaaccgagctttattaaagttttacacccctggcgatcctaaaggggtaatcccggccacttaattagaaccttattgcgctaacggtcccagtcaccaacggcgcgtaaaattccgctcacattggatattgcaactatttaggttaaatccgattttgtttcttgtccgaaaacgtatggatggacccataacgcgctgcgtctgaggcatccgcccattgcctagtaattcgcccacggttcaaaatacagtcacgacaaccgagtggaggtacgcacttgaggtccgttcgtgatttctccgactacgagctcgttgctttaattctcaggtcggccgaggcgcctcgtgattcttgcactctcttacccattacctgcagggatcgactgcagagctcagacctctgtcctcagtagccagtatccatcgacgggctcgactgtaggcacgaaccaaaccaggtcaaggtctatagaaattttgccgcggctctgagacagtgtcgcggccggggtgggagagcaattgtaaaggtcggcggcaacactctggtagccagaccggggtactagaaacagtgtcgcaactctttcctacattattttaccacagagtcccagctacacgggagttaatacttatttcaccctagggcaggtacaatctttttttgcgctcttcgataagttatatcaaggctctccaagctttgaagtaacatgacaattttcgcggatctacctttcgagctactaagactgattgtcgttgacctcgattactactccttgagatcgttttcgcttgtgaatagaagatgcagatcggtcagcaccttagatatcttctatatattcaaagtcgagttcacagaaaaagggataaagaagctaaaagggctcgcaatttctttattagtataatgcgtaagagtacttcattatgatacattagaattggtcgacctatatatatgattgttcagctctttatctggctccttactgatcctttcagtaatcctatattgggactatttttctgcttatatttatataccataggagtatacaagagattaggaagatttccggtaggagctccgaggaaagcaattttcctataaggcaatatttcgatattttaaaggacttacaagagcttagagtttactcttgaaagagcggacggatatctatatatttacagaattacttcggtatctctctaatctaaatactattaagctctccttctatagagtaaaggaagatcagcttctttggttctttaatcgagtatttcttagagacttacttttcgtttaccttaaggcagtacttaggggtatggctgttactcagtctataggattaaccttaaaatgtataaagattaataggatatattctaaactggctactaaagataataatatcctagaaattgtaaaggctgctttagcaaaagttgagagcttaacgctaatagaaagcccggggtttctagggtttgtatcctctgtccctttaccttccttacggcggcttgaattagcaaagtattggcttataggctttaacttaagaaagttcctgaaagcctaagatgggagagtgctatatacatatttcaaagatagaaatcaattgtattatgaaatatggaatatggatggcgagtctgagctcaaaactttgtctgagtcctttatctgctctaggaatattggcctacaagaatgtcttgtacttacaggagatcgtatatgatcgcacaatttcaatgagtcttttacacactctccagaagaatgttcacgaataatccctgagaagttagaacagttatattgcgtcccgaaactggtgtcactacctacactcttcgattggttctcggactctaatgccaagatataccattggtatacagtgacggtgcataagtttgaacaccctaatactgcccgccctaacctcacccaatcaaatatttaaaaggttgatcggcatgattgtttaagggctatttggttaggcggtgtgtttctcttggaaggcggtaaccaaaggggtgctcaaattatgcatcgtcactgtagttccggaatatcacttcatgtattgttaccgtacagtgtaaatgttatcgaaggtttcatagaagtaaacaagtcaaacatgagctggggccttgaggattcagtaacgtgtcacttcatctgtgtacttgggttaaaactaaatgcatacctcctaagactgcggcacctaaaacgggtcgcagaggaagtagcaatatataaagcagctgagccgttctatcattgacacctgatttcgaccgagatggatgaacaaattcaacttctgggtaataaaaagcgggctgtttggcgatcaacttgcaggacgcgactcgcttagcatatatgtaagctccacagattttttaaaattaaacctactaatatctctgactagttgagaggcttgatcttaaagtagacccttccgaggtccgattaaagacagaggacgaatgtctctatatatggcagatagatgatctatcgcttgagcctctttttcagaagtatatgagtaaatactcggtgggggcctacatacagcttcactgcgaggtaggtcaaacgttttatacagttcctgcaaaggtaaacttaataaccctttaggataattcattgaacttataagggttcttatagcgcgaaaagcaaacggaccttgaaaatgttgcttgtatataatttgaaaacctcagtcttatagagaaacttagggcagccgaagacaaagcatctcgcttcgaggaggcggcaaaacaagcggaagccgagataaaagatcagaattcagtcatttaggaagcgcaaatgaccattcatctttactagcaggacattttgaactggatggccgttgccgagtggtatcagaccaaatgtttgcagtgctcgagtgtattagggcaaatgatggctttcttataagacactacatctgagaccaagtgagaatcgctgttggagcttcatatttcgttgaggtacttttctatagtcttatcttgaatttaaagctttactgccatcagaagttttaagatagttccagctcgtgtgccagactaggccagaatggacaaaaatatgctataacacaattccttttcaaactggtagcccaattactatagaaatttggggatgaagtctctcacgaaacaatttgtgcatgcatcatcgtccttcgcagcatattttctggcctgcagcatagctttcaccctgcatcattatttctggcctgcagcatactttctggcccgcagcatactttctggcctgcagcatgatttctggcctatagcatagttttcaccctgcagcattgattttgaaatacgtataatcaccaccgcgggcttgaaatataaattgagtcttttttctccgaatacagggaagttgactaggcttcaagaatcaatatggttaaaaagtcgagaaagaaggcccaaaaggcccagcgaaatgcccgtgatatccaaacacccgcacccacggaagtgagctcagactccgaatcccatcaacctgaatcctcgagagcacaagaattgaggcaagagcatagctaaaataagaagggcaaagctcccgaacggaaggcgagatttgttagaagcccaacactcccagatgactttaccccaaatgcgggtgaccacgaatcaaatgacgaaacggatagcgaactaggggatgcttctaatcaagatgctcctattaaacataaactagacccgctaagccgctaggttaaggatatcattcgcagcgagatatcacaagagtcggaaagaatggttaaggagttcttcacatccccaagccctcagtacgaaagatatcaacaattcttttaaagactaaaccaatacattcggggcgttaataaagaccacaatatcaccgaccttaataccggtatcatccccgagtctggctacaataccctatataagacctagtaggaagaagtaagtaaggtagtagtaaaaggctccttagaggagttttaggtagcttataataagacacgcgctcttctaaagatctttaataaaagatattatcttcctaagaactagaatatcagtcaagtataggccgagcaatagatcggggcaacaaatcctaatattatagaagataccgactctacttccgatagtggcgagagttagcccgactagactcgccagcccttagctagtaaaaagtctagtgccgaatcggatattaatatcgacggtaattagcctataggacttaataccctagaagcgagaaccataaaatagtaataccaattgtactcggctaaagtattatattagtggcctaaaggtactagctctcagatctttatacgctacggaagccggtctatgccgatctatcgtattcaggctagattatataagagctataacccaagtcgggttaaacgtgttttaaccacgaagactcgcggcaccgctaaagtaaccgggataaggaacgggcttcctgaggagttttagaaataccagcgaaaggacgtggaggacttcattggcatcggttggaagatcgaagacgatgataagtaggggcttaatcctctcaatctgttactgcccactaaaggcatagtatatccacaaactcggatacttgtcaaatagaaagacggttagtttactttagaagggcaaacttttatctattatattacagctagctctaccttagatagtaatagagtgatttattagaaagccgaggagcttaaggatacttattatagaaagtatagcttaaataatattaataaagattataatagtaaagttagcgagcctatacgctactcgaaccaacgcagatcaaagacgaggaatcactttgaggccagtgaaagtagcgacgatgggagcgacgcctctattcagtcaagtcacaaccacaacagaagataccgcagtgagccagctcgtggcctagcctcgtctacacagggacgaaattcaacttataagatgagaaaggactcggcgacagagataaaagagcttgagcgtcggattcggctcctgaagatgcgcagcccgatacccactcaagaaacgcaagaatcgcaacggagacgacgccgaggtgaccgtgggcgcatagcataataagcacttgtgattttatacgttcctttagtcttgttatgagccggtgttaagccgaattttttgctttcgtattgtttctgatgagctggcctcacatattgctttcagtcttattttatagtttagcttagcttagaaattgccagacttgccttattttctgaacgattgcatcttcccatagtcctcttctatctattatgcttacgcattaaccactatgggcttccttatgaacttttaccatccatttctgcattccatttataaatgatgatacaatgttttctcgattggttctccacctgtatcgcatccctgttaccgttaaacaatatcgatagagagacatctatcctagaccggagagtttaattgctcgacgtaagtgggcttgacatccaaccatacaatgctactcaccagtgtcctatcaagtgccggggctatgtcagacactgttagtcttaggtataaagttcttcccctagcccgttgcttactgtaatattttctttttctcttcctacacccgtctggattaacattcctccgatgtaaacaccgggccacgatggcaagccattccaacactattattatagccgatgacgaggaactgccaaatctccagccaggtagctcacgacctcggagggcacctcgctataattacagctacgaagattccgagagcatgtttatcgatgcagccgataatgagactcgatcgcggaaacgcaaaagaaccgaaaagaagaagccgtctgctttggtacttgttcctcacaccctcttcttcgtccttatctaataattcattaggacaacgctttccagctgcttaacaaggaagtccgccataaagtaaaacggttgaaaaaggaaaatcgaatgcgtcaagatgaacttagccaggagaaggagaggtaccaaaaggcgcaagtggatctttccagggaaagagaaaggcgtgttttggagtgcaagatctgttatatgcaaccagatcactgggtgacaattctatgtgggcacatggtttgcgagtcgtgcgcggaaaagctcgaaaccccaaagagttgtcctatctgccgagcaccatccacaggacatatcaaatgcctaccctttgcaggataaaccatgtatatcatgttctggattatctggactaagaagcgtctattttgccgcaaaagcatactgcaggatgcgaatatggaacaactaatttccaaatgatcgagacgccgtcacggtcaaattactttcaaatcaaacttagctagacatgctctcggtattgaatctggaaaggtaagcgcgccgtatttactatggaccgcaaaaaaccttgatgcaagtattctctgggatggataggggaaatgggaaagaaaaccattggttgcattagctaactaagagagaggagtatcaaacactagggtttcttagaagactatctcaacaattcaagaatatcgtatttgttaaacttctctccaagacatggaattaagatcaatggttctgcgcctccgatagggggtggattcaaccatccaccttgctcttagtacctctcatccaagctatcaataagaaccggttcgaggtcatcgttgtactttcagtgtacatcatgtggaagctctatctcatcaaattcaatttgataatagtggttcttctcgagcaatatatatcctctttcgcaaattctcattctgcgctattctcttcagataattttcggcctgcttttgttgaaggctggtctcgggggaatccggatcagatgtttcaccgaggaagaccgatgtattatcgtcgtcgtcaaacttgaaaatttgaccgggtcgagatagatatagcagaagatcgtggatctgcctatctccggatggtggcatttgtaaagtattccgcattatagcggcaaaaaaaaaaagaaatcctaacagtttctgatattcctagcagggagttcgagaactaggagatggttttctttattgacgatggcatcaggtgcggagattgaacgatatctaagaacttgtccacgtgacctgggtctgctgacatggatcaatgtctgatacgaatcactcgacgttaggacggaactacttcccatcagaaattgcattcgtaaatacgggaatatcaatattccgataccacttttgatatggattagcgtgtctttgggcagatcatctggtgcattaattcaggtgctagttacatgcggtgttgccagaggttcctctgctcttcgaagtccaggccttgctgcactttgtctcttatgcacacgaaattttacagaaaaatttcatggcaaagtttgtttgtaaaaatgggtttggagttcgtaaaagcactccatttgggcctcaaaccagttgatatagcgttagtcatttagaatattaactaaacccactactatagtatatttagttattatttcacttaaagtataaaacgcagtctcagtatacaaacgaccgaactcagtagcaaaaagtggatcagagtttaataactataaatggctcagatcggtgtggtgggatttgactcgtctaacaatagcttggtccactgctaggtcaaactagcctttacttagtagaatagtaataaaaaccttactatcctcccctggcggaatatccgtggtgaaatgagcgagggcaccatatacattagattattagttataaatattatatttaaaattagattagatacgcatagtctatgtggttggctttagtaacattctggtaggtaaggaggatatacactgacttggagtggttccatttgaaagaacttatgtgctagtctctgctagcgtgattggaacccttggtgttcggcagaaccctgatttttctgaggtggtaagtagcttcttataggggagaaacctgattgtaagcaataaacggacaccgccaataacgcacaaaaatgtccaaaggtcatatcgtcctaaaacagtatagctcagaatgcatgccctacaaagacattattccatccccagaccttaactagcgttgttactcgttaaatctgtcaaggccattcggtatgtcggttgatttagccagtaaccacaagcggtattgaggtggcgatatgaaatgtggcaattcagctgcaaatttgggtactaagaacgcgaccctatgtccagaagtagtatagctcagaatgtatgccctctttccactatatccccatttaatccgtgttggtcaccgagtatgccgtgcattatgacgctgtgttccttatcgccacgtaggtccaaattcttctagcgccttccttataccattactctttccgattttctcatatttgtaccacccctttatttgcttcccttgtgactcaactacaacacgtagatttgcttcgctcaaagccaaagctcccggatactcgatagacaaaaccttggtaacatttccctttggtggcgcgggatcacttgcttctccatgcggcgaagcgctaagacctccgctgaggcgcattggatcttctccttgaatagatactccaccataatgaagtctcatgtctggcgggctacttggctgtccttgtatgttcggagggtagatcttgcccggttgagtctcaatgttccccaagggaagggaatccggtagttctgttgggtaatcttcagtgtcggcctaagcagttagtcaatttgttttaatctgctaaacagagtttgcccataccttcgagaccccgaaacacaccattagtagcgtaaagatattaagccttgacacggatcggttcgcaaagatgtttgctatagttgatgggtagtatatggatccccggttctctggcaagtatagcttatatattggagccattatcacaaagatacccatttcaggggcatgcatctactatcatagagcctaggcgggtctatgttctgagtaaccaactaaccctgcggggatgcattctatgctatacccatttggtcaccttctaggtttctgagtcagcggcaggggggacttaaccgacctgagcgactcccactttcacgtattgacaatgccagttcgccgcaatccaccagtcactgcggagggtctgcttcacgacctatccattcagatagaacatttttcaaggtttttggaagccgacctctctccagctattgcggaaaccagcacagccgtggattttatttcacgtggtgcgagctcacacttatagatcgtgcgcctacaaaccatccttcgatggtcttctctagccttagaagaggaagaatggctacagacgtaaggattagagcgtgcatatcctaagagacaggtccgcggtgtctagtcgataccgtctttccttcgttacctagggcggttaagcgatcataatgcttatagtgctcttcaataggggcgaaagcttagaaggtttaagattgagtttagtgagggaattacacttctattcgccccggtcttacctactttccgccgattatctcttatcgaagaagctaaagccatacagcttctaagagctagccatactaatattcttattgatacacaacgacttctatattttaagtctaggtatcaggcattggtagtaactcatatcctttattatatcttataactaacacaattctttatctaggttctgcgtctaatactaccgattccctaggacgcgagctgcctaaaccgttatgaattcaaaaacctctggcccgtacatatcaggccccattagtgcgccagtgctcccttactagacaaaggagcctccagtaggaacctctatctccattctaaccgatccttttacgaaaaggatttcgttcggccgtagcttccgcttaactggttggctttcccgcgtttcctctttcgttaaatcctataggtatagcatgaaagtcactctgatttcgtcgatattcgaaagatcccgaaagacagataccgcaggatgagatgggtgcgcaagcctggtgccccatgagtgtttttcggaggagataacgataacggggccttaacgacaggtaaagccaacttcgcctatagcctccttgattttccgagtgaacttctatttatcagccttagtttaatatactctttggcaaacctactacgtcgctttcctcggtcccacgccgcaaaaaccgcgcacatgtgtcagcatctcccctaccatagaccaaaggggctttttctacctttggccataagtgtagagaccgcttcacttcggaatttatgtcggctccgtcagaggaagctgaaaacaccacaaagcccgtgatctccattccggatagctcattgtaacgaggcgatctgttctacgctgttgtcatgtttgcgtccctgtaataggcctaaacagtctagcttgatagagaatagtcgcaattgaaactgggaggagggatagaaaggcaagacaacgagacatggagctttatatatttggcatgtttgaatcgagatgattctagttgcatttctcgatatgaatctggataaaactagcaaacacaagtattgaccctgagagttgtccggaaactcatttccccactgggtttttccactccactagcgtaaatacgagaggttcgtagtttatctatagtagcctgacttgtaagaagaccatagtactcgacatagaaaccgcattttaaatgcataatcgtccccattaagacgcctagtctacgccataaccgaatctgcggggtcggccgccacctaagaaagccctagctctgaagagcctatagctgcttagttaagcgtgagatagtatgacctcggggactaattaatatccaaaatccaaacaggaagaacagactgctgcattgaaaactagtaaaggaaagctttgttaaggtcatctgagcaaacaaccgcctagtcggccggcaacagtaggcatacccggggattgaatgagcttcgggtacatattttgggcaccaacctgattgagtacaatgaccaatgctaccctatcctttgaaagtctctagagcttctgtcaccaactttagactggctttcctcgcttgaactttaatgctaaccactccgacagtcttattcaacccttgaattgtttggatcttctgagcagcaacctcttccaaccatgctttatcgctttgcaaacgttgtatatcactattggagcattcgcctaagaggagcaaatcatatatacaactcttagagcacgctctaccgacgatcgtgatcaaaagatcctcagagagtatacagcctgagaggagcaaatcatatgtacgactcttggagcacgctctaccgacgaccgtgatcaaaagatcctcagagagtgtgcggcccgtgcggcccgtgccgtcccttccatatcccggaggcgggtgttgtataaggaattcaaatatttcagcgctctcccgctccactttgtcggcagctgcagatacagcttagcgccagtcgtcgtggctttcggtatggttcgagatccacacgactccggccacgcagttgcgtctcgccgcataagtcaagaggtcttctgggatctcttcgtcatggctccagaaccaacctaacatcggttcagggttttgttagtataaaagctgataccaattcggaagtccgttatttggattggggattctaagatccacacctcggtgtagcagctgatttgctagatctatatcggcaaatttgcacagattcattatctccgttagcccaagagttaattcaatttcaggtattgatcgaagacgtttccagcagctctagaacaactgggcatcctaggtagtgaattgtaatatcgtcatgtgtccctctaccgagatagatttgaggaggtcgaggggctctatcgcagacattgtccgctctatcaaatcagggttctttgaatttgccgcaatcagatagagggtttgcccatcccgataaaaagaggagggacgaattgtttgataatcgagtagaaacataaagcactgaggacaatcgacgattgcttttaaggctaaatcatgcggagcggttttatcgaaagtacgctgacgagtcttcgtatggtcaaagtcagggtagagttcccaactagtctcaaatctcttccgaagcgaaagtcttctaagaacagtgtgaatcctagttttgaagatagagtccttctcctcctggcaaaaagcttgtagagtatataaggcatcatgtgatccaagcggctcggaaaaaacactagcctcgataatggaatctataagctctgttggcaatttttcgattctcccaaggatattgtctggccctagagaagactctgcattctctatgcctttatagacagcagtatttactcaagggtctggcatttgccaaaagttgatgatttttggaacctcgatgtttggaagctcgagtatgctgtctgattcggcgtcctctataccttatagtgagcgagaatactatcattgcgcgtatttgtgcaacttacgattttcttgatctccccagactgacgagggattgtcttgaaagaaaaaaggaccaacccacttcggcagtaggctttgtagcgtgagtatagggaaacaatccatgggccttttttgttgcagttatctagaggcatgaatacaatcaaaatagaagagaagctcatttatgtttatatgctcactaactatagcagtacggtttgatataggaaaatatatccgccacttgtccaatggtaggctataattgacaaagagccagaccttcttaccgagctaatatttcagattttatagatcttgtaactaaacagacaatttaccttgaccctaaagggcttgctatgtcgagcttcttctgtctatcccaatctttgcctgaaccatatgtgagctatggtatggaaatatttagaagtaactagtaaactggaatgtactaggaaatttagtatggaaggaatcgaaagaaataataaagtatcagaatacggaaggaaatcaattattatataataaaatacagagtgtaggtactaaagatagaagtaaaaaaggttgtattaggggaagagagagctctctatctaactatctaactaactatcataagggtgcttaactagggcaccgaggcatccacagcatttatgccacgtcgagcttcttctgtctatgccaatctttgcctgaaccatatatgagctatggcacggaaatatttagaagcaactagtaaactggaatatactaggaaatttagtatagaaggaatcgaaagaaataataaagtatcagaatacggaaggaaatcaattatcacacaataaaatacagagtataggtaccaaaggcagaagcaaaaaagattgtgttaggggaagagagagctctctatctacctatattactaactgccacaagggtgcgtaactagggcaccgaggcatccacagcatttaatattgctcatatacgtcaaatgggatgatatcctgtacgtgttgtggcagggatacatggctagagattggcataaaggcagactgcggagctgcggttctgatcgagaacgccctgggacgttagctgattttggatatatgagtggggaacttgtgcttacagataagaagtacttgatgtactctgggttgggcttgattatcacttcgtcagtcattaagccatgaaagaagaatatatcacccactcgtatacgacaagtctcagccctccaatttgtggatcgtccgagatatcttggataacctctgaattctgaaatatagccgcgatggaatgagaatcattcacgggagtgagtgacccctcttcaagcctcactccagtgatagtttcttcgccccttattcttttgtcagataaattggctgtgctgccaggagtcaactcacagtggtgtgcctgttgcatcatattctcggtaacaaattacgaaaacacggcttacgtcggcccttaggccagataggccttggctaacattgatgatgctaattgtggacgatgaagacaaggaaataccggcaagtctctcttttaagggaaaataggaagtcttgctgcgagaataattatctgggaatgagacaatttatagatttctgtaggatcgcctaatttgataaagtaagcaacggagggggtctaattcgaaacctcaataatcaaggttcatacaatggagcgttggttgctttcaatggagatatgggactcgaacttatctcccaccgagcatggaaggccacacaactcataacgtgatccatcacatcatattcattgactagataatagtcctaaaagtacattctttctccattcatcggagaatcaacatctaactatgagctgaacaaatttcatacaaaaaacaaccatctgccctaggcgttcaatgattctactatctcaacggctcgaaatgcagtggccaaattcccatagtcgagctaacagagatatcatatccttcctagctggttctctaccccaatgtccaaattatccacaagatgacgcataaggtcctccccgttatgcgagtaaagtatacgcttgattgatatacgtagggaactgggcggcaggatatccatcatcagcagactgtatagcacgaccatacattccaagtccgtattaccagcatttaaccccattagattcttaataaacgtcggaggggcatatcctatataccgagaaagaataccggatagcagatcggtagtaatgggcccatcatcacacagggccgaagagacgatataagtagcgacatcgccgtattcaatcataaactaagggttatccatttcacggactgaatagttagttagatatctgctatgtattagatcaaagaaaaacatacagaattgacttataacccgtagcaattgcgcggtgaggggcttggtaggtattattggcgttattaacatagctaaggaaaagaggaggtaaaatgccatatgactggaatagttagtagaatagttacctaggaacggagacactttatagctttctacaggttcgcctaattgataaacataagcaactgttggggcttcttcaatataaatcgcacgaaaacagacttgggcgctaaacccgataaaaaaaatggcgagttcttgtaaagatgcaatcgactccaggaaattaaagggttatgatctataaagagcatgaaggagggaacacctttcctaaaagccttaagtgattatttaattggataattcctacgttactcagcaattttagagagctattgtatcgatattgccagtccaattaatgagttatcattcaaattcacaccaatttccttatagcttcacgtgctcatcaatggaagcgagaataagccctggctttcaaacctcaaggcttagccacacgacacttgccacatcgatgcctgaaattctgttttcttagtagcacttctcccattgtgcagagacctttggtaaccttatcggcacatggaaatggcagagccgtttccacgcattcacatccataagtataggtatattgaaagcacatgatacttcactataatctatattagcctccgtctatacaccttagattgatggtatcgcgaaccttaataataaaggcctatacaacggtgcgttgattgttttcaatagagatgtgaggctcggactatttgcaggcgaagcaattcagcacagagctaaacacatagctcgcgggctcttatacctaacttcaattgtagagaaataagaggcagaagtgcatagaatataaggataaaccaacaatagtgcaacggtaaagtaatcaatgaaaaatgttcctccttcaatccggatgtagggcaagggatatatataatacaagcgaagtttctcattccagaagcagagcttatgctgccaccaatagaacctcaatcaagcttgaatatcaaccaagtctgacttctcagcattactttggcggtggaggcgggacgcccagcttcttgacgcctgttgtaacgtataggccatgtatttcaagtcactgtcccgacacaatgaacagtccacgtatgatataaatagcaggtctcaagtacaattgatatatatttgtgattaagagatagaaaagtccatgttgaaatagtaatgaaataagcttgtgctatatgctggccgcagatttcgacgggagacatttgatatttaagcttgcggagaacggaagaactatctaccgctccccggagattatccgcctttcggagcgtcccaacgagccccgcgccacttctgcccaatatcatctttgcaagacccttaacgaccgtctccccttcatgtgagtaaccagagcatgttgcatcggctgtactgataaaacttcaatagatttcggtgcagttcaactacattcgcacttgctcctcgcaatccaagcgcatatctatggctacgaagggttcggatgacaacttggtggaatctttggcgataccttcatctatcaaagacatctacactgaggcttgcgaaaatgatcagtctctagcagaatccctatcaatcccttctgatcggatatccgccactatgctggtgcaaggcagggggagggaggtaatcgccaagattgaagagctctctttggtgaggatgcatgattcagcttcaatacaattgggttctgacttggaatagaataacccgattcgaaaagagcgccgattaaaccaatacggaataagacctgctctccaggttttctcctcaggtgtaaacatagttggccaaccttatatggcaattataccgttttacatcaagggaaaagtgacacttggcgaggaaacagttcagttggatcgctactatcatgtgtatggtgaaagtcgactggtgattgagaataacgcgaaattagggatttgggggtataaattgggaagttagcattatcgcctcattaagatacataaagttcctagtgagatcatagaccgagattgtgtagtggggcgatacgttcaaaatcaaagcaagacctttgggcaatatcatccataattccggaaatattaataggttggttggaaatttgttcatagaaaaggtgcgcaaattcggcctcgttacaatcctctggatttggcgattcggctccgttgctagggatatcaacgtttgcaaaccccatgttcgatggaaccgaatcttgcggaacagaagtatcgatacgtcggaacttctgtctccctgattccatctccgaaactcggctataacagaacatcacttaacaaaagtcagcatggagtaggttaactcttgagcgaagtcaactcacaatcgtaggaattttgcacttgactaaaccatgggctaaggtctcgtactagatcgagcagatgtatcttgctctgcaaaatcgtgacatatatgtcgtctgaaagtagtttgtccgcaaagcgatgcatttcatcatagcggaatcttcgaaattgatctatatgcagcccaacgatggcggaaattgcattgcatatgcttggcaaaccattttcttttaggcgttcggaaatgatcttctcaaaaaccatatgcttaagaccagctgataaggctttcgagaagaaactgttgttcccataattgaaaatattggtgttagaaggactcggagacaagatgtgttgataaatttcctcgagtttcgttggataaacttcattatctagctgctcgtttgtgaattccagagcaatcgatctcagtgcaagaagtctcaagagcttttcctcagggccaagtgttcgatctccttctaggcgccttatgtgctccaatcgaaggtcctcgtcacagcttcgcttgcgagatagtaggtgacttggtaacttttggccagcttcccaaacccaacttgctgattgctttattcgtttcaacaagtcagggacatggtctggtggtgaaagagcacgtatggactctgcgcgtatagcgctaccgggggagtctctggtcggtatcaactgggcggttggagcggaaacttgcaggctatcgaagtgaggtgtttgtggaaataagacgccttgatcgctgagtgccgtcgtttcagcaacttggaaaggttgaggtgaatgtgggggagatggcacgcttggggtttccttgggaaaatgatcggtgaacccagcagtctgaagaggttgaggagattttgaatttggcacgcctgcttggtctccgggttctgcaacttgatgaagttgaggtgaatgtggaggagatggcacgctttgcaggtcagtaagagtcgcctgaaaaccaggtgtcgagggtattaggttgtgctgaagacgttgaccgactctcctaagcgtcaaaatggtctgtgttgcatgcgagtgaagatcgctatcagatgcattgcgtattgtctccaaggctactagaaggtccattttgataagagaagagatgggatagttcaaaattacattctggagtcaggcttactctttagttttttaccatgagcttggacccacggtcgacactgcgaacttctggcgagccttaacctcagtcgagtgtccaacttcaaacgtggttcctaaatggtccccgctagctagaccagggttcggacccacattcgagtgttcaacatcgaaatgtgggtccgttttgatctatttgattagcttctacgtacgcgcaaggcgcggtaagtagttgaaagctgggccttcgcttgtgtaatcgttcgaacgagagcgattcgctaatcacaagattgcgcagtccgcctgcattatcacacgcctaatgtaggcgacctgcaagtgttcctcactccttagttgggggcggggccatttcattggacagccttgttcgaatacagtggagaatacgggcacacctagcctggccctaattggtatatcatatcaccaccgcgtgcggggttcgcactcgttcgtccaggaaatgatcggcagagtgcggagatacccaaattggagtgagttcgtcttcactatccctgccgtcctgtgggttgacaagattggacgaaagacgaaggaagatattgcaggcctctcctcttttttgacgtgtcagaatcagttctctattgacactaatgcctctattggagggattgaattgtcatacagcgtagtacattctggccaaccgctgttggtaatgtgggagaaaagcccgttcatttcaatttggtttgttatttgttcccacgcttatattaatatccagtctgtcacccctaagagggaaaaagctataaagccgttgaagattccttgtcaggtaacatcttctatcattactaccatcgctcttgctacacatcctcttgctacaaaccgccccgccgaaaagcccatactatcattgagaatcctcagtgacctcgtaccgtcgtcgaatatgaattgtccaaatcaagcttgcaaaaagggcaatgtgaccgggagaactcactgcgagttctgcggtaccgaactcccaggatcgatgtatcaacccattattttggaaatggtacgtctcgataatatcccggcagaacttcaattccaatctcataaatactagaggactaccattgcttgtgagcaggttggtacgaaccaactgtgaaaaaagatgatatctcggagtctgcgttttgcccgagacagtgccaatcattatttttactgtgaacaatttgtggaacaaagcaatggctctcttcgattcttaagtttctttctctggcaaactcgaaccacattcctttagaagtgccagtcctctctcatttaacttaggatagttgcgcaatgcaaagaaatccaaccaaaaattgcgggcctcagtataatctggtagatatatactaagcaagtctttccattctttatcgtcttgccctaggccaattcccgcacaagtaaattcccactaaacggggaaaaaggcagaagattcctagtccagaatccctgccagattactattctcgacaatgatattaacattggttaggttaccataagtaaaggtatagggagccgcagctagcatccgctgacgtaatttcgaacgaacttgctccggaacttgagtcaaggccaacgacatctcagcccataatttatcgtcagatgaaaatggtccgtgtccaatcccatagccattcggaaaaagaaaggctgagtagattgggtgcccgccgatgctttccagtcggtccgagcgaagctcatgaagctgcatcaagtactcagcagtctgttttgcgacgcgttctttgtcggccgatgtcatctttggccaaatttcactcaatgtttgacctcgaatccgtttggtaaggagaaaactagccccgtcgtcttcttgccattcctcaacgatttgaggtataggaattgaggttcttgacgccaaaaacctgacattgggggcctcaaagttaggtgggtcggaagaccgttctttcaggatcaagtttgagcctaacgaccatacccctcgattgctgacaccgtagaagagattcacgtgactctggtaacgacatgcgtcttgacgtgttggagaccagctacacgctgaacaggtattttcggtggccattttgtaaagaaacgattttttctaaagggatgtcaaattttgggggagtcaggagcatcaaaggcttttatactgacggaaggaagggggcgatcggcgcgacagagtgatgtatcatacaggataatagtttatccgtaatattcccaattggcaataggttgatttattttccagcggagtggccccaggcgcgtaatagaatggccttggcacattatgccagtggatcttctaaagaacaacaaaggctccgagaagcggcagagtgccgccagggaaaagacgaatggcgactccagcccaacacactgtttggattttcgatcgctgccacatctctctgctcaagcgatccgacgtgagacggatacgaccctcacgactcagtgtagggcgaccgacccagtgaaccgattttgcccgcagcgcatagtccatttgaaacctgagaaaatctaattttggtgagtgctgcggtctcttgttgacgtgggggatattgtcatacttccagatgctaaaattagccagcggaaaccttgtcatttctcggggaatacttctaccggaaaccgtgatcagctgacatcagcctcccggatcaagcgcccgccaaccgagacctatacctatcgcgattgtctcaagggaccaacatcgatggctgacagtaactcgccagattataaggctctttttctgcaggcggaaaagagactcaaagaggccgaagagcaacaaaaacaggccgaagagcgacagaaacaggaacaagagaggaggaagcaggctgaagaacgacagaagcaggccgaagatgaaggcagacaggagaaagagagacgagaacaacttcaagagctcagccgaccgaccactttcgcggaattcttacgccattcgcatgacctgctctcccgaccgctgagagtcgagacaccatctcgctcgactaccggcaaaataccccttcccactgggaaatattgcccaacacgattggaacactggaccgactgctcagcactgcagtcggagcttttcaattccgtctacagctatctccagttgacaccaggaggctctccgcgtttgttttcatccttgcatgagctagaaggattaggccgacgacttggtcgcaagcccataagcagcgagcaggaacttgaggcctatgagcggttcgccgtagaagagcacatcaatgatataataacggagttgtgcaagatacccgctgctcgcgacgagctcggcctcggagatagcatccagttcagcaatcatacgaattccttgaatgataacgttgccattgaagtagatacaactcaaccgtcaagtgtataccacctaagacctgaccaattctatatccatcgtgtcgaccgcaacactaccactctcctcacatcggtcgagtataagctgccttacaagctttctgtcgccacccttcgtatagggctccgaccaatggacttatggaaggatatggttagatcaaacaaaataccgactaaccaggaagcgaagctaaggtacaatgcagagcgacttgtctgctccgctcttgtccaggagtatcatgtgatgatccaggaagggctcgagtactcctacgtgaccaacgggattgcccgggtcctccttcgtgttccacacgatgatcatagcacgctttattacttcttatgtgatcctaacagcgaagtgagtgcagaagttgaagatagtttccaacaaccgaagacttctgtggactaacgggattgcccgggtcctcctccgtgttcgacaaaacgatcctggcacactatactactttctatgtaatcctaatagtgaagtgaatatggaaatggaagctacctttgcaaatacttctgttgtaagaacactgtgtttgtgtctgatggcattccacttgctagtgcgaggtcaggagtggaggaattctgtacgaccagacattccaatatggaagaccagtttcgatcacactcgctcttatattcccgaagacgaattccggcaacttcctctcaactctgatagtaccgccccagaatttccaagcccagattctggttcgacttatgaaccatcgttatctccgccagatttccctgaatcaacagctcgttaagtgtctacgagatctcgagttagctgtgccctatccgacgtgaggtatcgctcacagtcgtcacaatcgctagaccccgattcgaaaccagcaatatactacaaacgaaccttcagccaagttccatcttccctatctgcctaacgcgtggctcgacaaagagatacaaataatgataaaggaccagacagccagtcccgctaccgcgatgcgcaattttgcacccagcgatgcttactcgggttgcagtctggcggtcttctagacgactgttgcccaaatgtgatgctccatcgtcgaagcaatgacgatccgcagcatccgattacgtccaaggatttggtgcgtttactaaaagcacaattggacgaaaacattgaccgatgtacaccccttggaggttgcggggcatacggtacgccgttcaaacttacttgtctcgtatatgggtataccgtcatcggaaaaggaaccatgtcggcgctatggaaagaagtctctcgcgaagcggaggtataccgaattctgcagaaggcgcaagggtccgctgtgcctgttttcctgggtacgatcgacttggcgaaaatttatttccttcacggggctggagagattcgtcatatgctcgtgatggcctgggggggggaaagtacggcatcgatggagctgacgccacagcttctgcaggggatccaccaatcgaacaaggacatcagagcattaggaatcatccacgaagaccttcggcgtgacaatgtcttgtggaatgaagaacttgggcgagcgttaatcattgactttcaccgctccacattgaaatgtcaaccgactttgcggcggccgcgagtctcaaaacgacgactacctcaaccagagattgttgactcgaaacgtcttcgtgtgacgtgaggatgggtgctcattttattggagtagcatgaagcattttcggcccgtatccgtgtggacagttctttgagggctgtattggatctgcctcagcttgtggaccggggatatcaggatcccggtctcttagctgaattctctcttcaagaagggttgatcttagtggagaatctgcctgaatgttgacggctgtagatcctgaagccgaagaacacgggcctggcgtcggcgaataagcagagtttggtgtattcggttcatcgttctctggttctctcgctgtccgtatttggaaagcctgtgtacgttgcatcgcccaatctgcagaggagtcttctgtcagcatttagcagctggaaaaggcagtatacttacttgagtctaatttagatgcaaggttttgtgtcgaattttcaactttctcccacaaatagtcaaatatcttgctggccagagcatcgatcttctgctttccttcaacgcgtaatataccacgatcccgaaggtgcttaatcgcctcagatcggggtttctgtctaatggtatgactctaaaaaaagttttaaaagattaaaattctcaaggcttcgtcacggacccccacgcctgaagtataccaaggcaggagactcacaattcatcatcagcatcttcaggcaagcaaaacaaaacgccgaggtgtgtgtcttccagggattcggtgtcgtcgacatcttcgcataaagtatcgagtctcttcccttctgtgacccatttggagaatttttccttaacctcttttgggtcactgcaaacgatgccagttttggaaattatttcagccaatatttctagcccattggcacggacgtagttaagacataacctgtccttaagccggtagtataacactttgatcaagcgagagcgtacgatatctttctccgttctctgctccaggttcttgacgtagatgtagagttgggccacaggtgatctacttaaatcgaggtcaatactgctttccgtgaagaatgataacgggttatcctgccatcgatccacactagccagaaaatcgggaggggcgtttatttttaaagtattgatgagttcgttcgattttcttgagatcttgaagctttcttgagatcttgaagcttttctgagaataacgaccgatttttcttctggatttttttggaatagaagcccaaagtcgtctgaccaagttcataacctagtcttatgttaatttatgttgcctcgttatgtccttgtagaagacgcacctcggggtccaagagcatgtcactgatgtcatcctttccactagactcacaatcccgacaagccttttcgagtttctggctaaaatacttgctctgtgaaagaccccatggtagcaagttggggaactgtacaaaactgttttgctggtttgtggttagaagaaaccaggggtagttgcgtcgaatctttcctcccggaggtcacatgctgtctgacccttgtttcttgagcggattggtcgatctacaaatacggctgtaagcactgcctgcatgccacacagccaatcgcttttgggccagggtagcggcactagcctgatgccatccaggcaaaggtcaaccacgataaaggcgataaaagcgcattcaagttagaataatgtggttctaatctaccataaacacgctttggtggatttggtggggttgcgcataaatgcgcaacccccattaggcaattttcacagcccacataagggttagtgtcgatatctgttagaaaaccaagagaaccactcctgcaagtattctgccaagcagtgtaggggtcaaatatgtgccgatacagctgaacgtggcgtccaaacttgtacgttgttgattggccctccgctttcaaagttggccttcctagcgtttcttttgtggctggccactgacttgtgatgtgacaggtctgcataaagaggtttagctaggaagattctctcatgtttataaacactagtccctcagctgctgtggtggatctttcccttcaacctctctacttagtgaccacttgaactagccaacatctcgtcaattctattccaccttatactgttaagatacagtctgataaaatatgtcgactatcaacatggtgaaatactacttctaccggggaatgctccctgaaaatcaacagaggctgcgagacttgatagcccttgcctatcagaccgcaagagacagaaaactctaccccaaggccatcctcatcaggtgagaaagaatttcagcacaacgaacaatgatatagagacttgtggcccatgtcattagagacttcgctaatgtcgaccggcaggtccaatgagcactccagtaccagtcaaggaggcatacacaagccggatcccttgggttggcatgtcactctctgtttcaaggacgacgtccagcttgccagcaatacccatgttgcttctcatggctacgtcaagggcaaaggggacttgacttttcttcaagcgactcactcaggggtgaagccagactcccacttgaagtcgagtggaaagccggtatggccttctgaaatggaattagatgttgcaccggagattgggtatggtcactttccaagtgctggtagtggttaggtttggggttaccaatatacttggatcttgaagggtagcaaccggtcgatacaaacccaagtcttgttatgaggattcaccaggggatagtgatagctgctgcctgtaaattcgtgttgcaattggtgctttgtgcggaaaatccaagaatggtagataaagtggctagcaaaacttggcaaaaacaaagacaattacatggatttatataacacattaccgtggaaatctgaatagtgcacaggcgtgcgtattattattattcgtcagcgtgtctgcaaggttgaaattgtcagagatatttactcagtatagcaatagtatagacctacatagaaatgaaacatgtgtatacttgatccgctttcttttgcctcaccagacagagcaagacctacggagtataactagattgagcccgccagcaagcagattagtcagccccagcatcagctcggccaaatcctgaaattgccgaaccctcgggaaagaatttcaatgctccgaccgcatccggacgaattccttttttgctcaaattgaacagccctagaaaaaaagggaaattatcagatggtacgaaaaaggcgtgctcttacggaagaggaagagcaacaaggtcgggagtcccaaagaaggaaatttgttgcgtgcgttttccagatagctcacaccggagcaccgagcactaacacacagcattcacagctgtcaaagatgccactcgcataaaatcaaatgttccggagaccagccgtgtagcaaatgccgcacggtaggcgtcgctgatgaatgtgcctatgctactcgggatcgccaggtgaaagttagtgaaaagtatgcaagcaagccaccgactattattagccaaagccctgaaaagcttgtctattccaagtctcagaccagaagctaaaactgtcctcttcaatcagctatttggatcagatcctcgcagagaatcagcggcttaaggaacggtcgatcacctcggctcaagtcgccgagaccaacgacccctcgcaaaggtagacatctctttgactttccaaaagataacccacaatatacagaatactgaggtttacaacagaggccctgccaagacagcagatgtccctgatggaacaggcattcagaatccattgattggagatcgagcctggtttcaccggtatgatccctcttcgccgcccatctacatcggcgaggcagcatgttcagcattcgcgacacggtttcggcgtttcttgtcggggaatagtggaatgccacatattccgcgaacacagtatgagcgcgaagagacaatcgccgcagcgaacgaagccgatatccagtggccgagtcttcaccatgcccggttgttagtccggatagcaatccaccagatcggacatctgtaccacctcatgatgcgcaagtcgactttagataaactggaagaaatctaccagacacaagactttgactgcgcggctaacaagtgtaaattcttcgccttgttcgcctttggccaggcgtattcaatcagatctgagcccaattctggctccagggtaccaggcacatcgtattttgctcggtcaatgggattggtccagatcctgccagagagaaccagtgttacacacctggaaaccctgctactgttggtatgtggctcagcatgtgctattgttcgcatcaaaatacttaccatatcccaagtctcttttctcatactatctcaaccggcgtcattcagcatacatcctgattggaaacgccatgcggatgggtttgaccatcggcttgaatcataatatcccggaatcacagctcatcgacccagtggagcgccaacaccgcatccaaatatggtggacgatctacatcttcgaccggatgtgggggtccaaaatgggtctcccaatgcaaatcctcgatgaagatatccacgtcgacatgccgtcaaccatctctccccgctggcgccacgaggaagaactctccgactcagaatacatgaccgccaacatcaagctggcacgcatagtgggcgagacaatcacccgactatatagccggcgaaagtaccaagaaaccttcctccaacgcgttcagaaactcctcaaagccctgaaacactgggtagaaacactccccgaatccctcagactcaacatggaagacctagaatcgagcaagaaacccatcgtctcactccacatggccttcaaccaatgcgtgatcctaacgacgcgcccaacgctacttcacctcttaatgacactaagcaaaaagaggaaacctcaccccaataccggcaatcgtaccagtggagccgagaccgaaagcgatagcgaagacgtatccgtttcccaaccagtccttaccctaagcgaagcatgtattcatgcagcgcgacactcccactccatgatcctgacaaggtggatcaacgggtccatgccaaccttcggctatttccacgcgcactacctcttctcctcggcattgatcttggcaatgtccagctttgtaccaatcggcagtccgactgatatgaccgcgttcgactccgcgctggatctgctacgctctatggccgagaatgggaatttggcggcggcagaattctatcggaatctcgagcaggtgaaggtttgtttaggtgagtatcagggaggaaggcgagatgacgggaatgctgatatggctgctggtggaggtgtcgctcctaataccaacgctaatgctagtggtaatgctgctccctctggcaatggtgcagtacctttgtctgggccttcgtcggatttagcaacagctactactccttttttgaacgccttgccactgaacccgtccacatcggcaactatacctccggcatctttgatgcccacaacgcacagtatccttgcttctgccccaaccacacaacctgtccataaccatggattcgatgcatattcctatcccttgagggatgccgtcagtgggtacacgaccgaaatggcgtttctagagccgaccatgcaagattttctggcccagtcagatattgaccttgggctgctgcatcctgttgatacgttctttaacgaggctgagaatctgtatacatgccacgagttttgattgggtatatctggggcatatgagataataatatgcacgttttagacctagtcgttctggtctgtgttgacttgacaagtggctcaacactgtatggtcgaagctggtattcaggtcaagatactatcgtgtgtacgcagagagatatccttgcaggcaaaaacagttacggtctctttccctcaccatcaagccggtgtatgaatcaaaaatcccataactacatacatgagatacagaggaatatgcgcgtctagatttcggcatcaacagcaagcccaaagttcgagccatgtcgtgaaagaaggtccatgcagacaagccaggctctccgggaagaaagatctttggtcgacattgctttcaaccagtgagtcgctttgttgatctttttagtgatatcaacagccttggcggtgcctatatgagtgcgagtgaacagctcggtgagcaggatggtagtcgactgcatgatgttgtgcaggatgcaccaccacggagcgacgccatacagccaaatcaagtccggattttcaggcagcagttcgagcatttggcctgccatatgaacgcacaaggctgccatctgatcacacaccgttccctggcccgcttcagatgactgtcgggatagacggcggatacagggctgcaagattatcagcttggtcgagtagaattggaaagcaagactagcacgctgctgtagaaattgaggggttgggtctagcgttgtgaaatcaaactccaccggaagacgagacaaccagttgtcagtatgattgtttagcgtggagatggcggcttcgatctcgtgccatgactgtcgaactgctctgggagcatagagcatatcaatagcttctcgtaagagatgagccaagtccactgtgtacaaaaggtacagagaggaatttggtgttagattctctacccccgtctgtctggccctttcttcttgttttcccttgcccgactctcgccgttccggggttcttggagccatatactcttttggcgaagttgccgtggtatcggaaattaaagaggggggaaatgtacttcgagtcctttggtcggtattaagttgcgcgacacgcctgtcccaaaaattctcctctgcgaaggggacagggaggggtgtggagcaaaagatttctcccgtaccaggtggacggcctgtcatctcacatagcaccatgtccaacataaacagtgcccaccaaactcgatatcgaagttccttcgaaaactgggtgatgctatcgctctcgcttcgaatgtttagacccatagtcaccgccgatcgactcgccattccgatgagtttccatgacctagatgagcaagaccaatcagatataaatcatgcaataaatcaagaaggaaaaggggcaagaccgacctattaatttgaccaaccgataggaggtagaaagcagccaagccatccacctgtgcctgttgcaagtccggatgatctagcaatactttacctacattcaacctccaagcccgtgcaaaataagtctgatggccgtcgcaagttggttggatttgatcgacgaagaagcaatgtctggccgcaatggcaaacaccaagtttagcactataatccatcgtctcccaggtcgcacgttcggattcgcatagaaggatcgatattgattcagaaagacggcctttccaatgatggggaaggtaggatgtacggcgtgaaagtaggtgtcaatgagcctgttagcgattggttgcggaggccggtgtgcgaggtcgatatcgtcaggaactagaatttccgagtcatcttggaagtagttcacggaagataacgaagggcgtgcgggggtatctttgactgcaatcaagctgccatgatcaagaaagcgcttgagtctatacaaccatgccatctctgaatgttcacccacaaatcccgtcggttgtactttctcatcccgatcgaagtcctcttcggtgtagtctacagcccccgaggaaatagacacatgactagcatcagcacgggagtgaagccctgattgattgatgggccttgttgggttggtgaataaggtagggataggggtagtgagcgtggtccgtgaatttagctccctcagtgttttctcgacccgctgggccgacaagacatcgagcttgggataaagttcgcggagcaaagcatcgaaggtttgaacccgtgtagttagatcgttcagctgcctatcacatgtcagatgaaagtattagaacagacgaaaaaggttaacgacttcaccatcttctctcttttccggtcgccatacgaacacgggacaccggcatccaggcaacgatgacaggctgggcgatgaccactacatttggccttttgctcgcggcaattttcacaagcccggctgactcgaccactgctagtccaactactggattgtgcgttccgggggatagccaccttagcattcacgcggtcgcttgtgttgaatgaaggataatcgcgggcatcacggatagtttcggtattgagctccaggggggaaggttgcgggcattcaggcgcccagtcaaaattgaatccatttcccaggttcggatattcagaaaacggagcaccaaagttctcacccatatcgttactagatatagttttcgaaaggatttgatcataggaaagggttttcgcacgagacgcaagacgctagcgggacatcgactcataagccacactggacgaaccgccggggaagaagaatcatcccccttgcacacgaaggaaaaaattaaaaatagaaacacacaaaagcaaagtcgacgagtcccctactgtggactagtcacaagtgggtttcaaccgagatcgggtcctctggtatgctggaggtctttgccgccactaagagcagcgctaaggccaataagtgctttgcattgcactttggatggtatttttttgaatagacgagaatgaacatcatagaagcttccagactgtgaatatagatgtgttgtatcgcatagacaatggcgcgggtggtctgtacgagccttgctcgaggttttccttcggtttgtagcatccatgattcccatacatataacataaagttatatggaacccgctctctgacaggctgagaagtgatgttctctctgtactagggttcagacccaaatcttatcgccctctttcggtccgagaatcaccggtatcccaaattccgatgatagtttggcaaaccatcattgtgtcaggacccagcatcatgaatacatttcatttggtttgcttatcagaatcagatactgcacggtaagattgctgcttcagtttcctctcccttcaagggtcttggcaaaatttgcacggggatctttgttgtgctttcagacccggaaatacggaatcgtatgacagagtcctttctaggtcaacatccaatgcgtttctttcaaccacatcgtcttgtttctcttcggacttgcctcagtttgggtgggtcgatattcgttcgtcatcaaatcgaagacccactgacgttcgcatgctcatgcttaccgaaaggcaagcagacaacaaaccatcacgatcccgttgatagaagtgactatcatttgatttcctggtcttgtaatgactcgccgaagcgtggttgattgcacgatcagctgcgatgaatagtccgccagctagatggtccggcagtccggcagtcggcagtccggcagtcggcagcaccgcagcaaatagagcaatccaaacgcctaatagaccttcgaaggaagatcacagatgaaactgatcattttcatcatcaactatgaaaaatttagcggcaaaattttgacgcggacccaaagggaccggacctctgtacagctgggcaacgcgcaccagagtcttcgctcaaccctagtcttttgctggctccactgctcgaatttctaataatgcgctataggcagcattttaagcacagcctgtgatctgcaaggcgtgagaaccagaagtctgcaatgagcacttaaaggcaagacagaggacaaaatgtgaacgaaagcctcggtctttgctttatctcataatgtaagtccgagaagaagcgccacgatagtgatatgaccggtgatatgagctgtgatatgaagatgctcatacttcactggaagctgagctaaaagctggttgatgcgaggatagggatggacttcggagcaacgcgcccgttgctcttggtttttctgttagtgcacgcgcaaatccattgagccaccattcagtgtcattttcccaggaaaacatcaaagattaagcgacaaagctcccttcaagctccgctctgtgttagaggtagcgaagatatgttgttcgtgtgttggaggtgccggacaagactcggggacaatccggaaaccaactccgaataacgtcgaaccaattatggccaaagagatcgacattgtaaagcttctccgcccctatgagctcaggcaaaatccatctccgactcaagcctatcaatagcgcaacgcacaatgcagcgggaaatcgagccacgtgttggaaccgttcaaggggaccacgacccaagcgcaccccaaatcacaagacaatcgctttctattcctctttgacgtcaatgaagagtcatgtcaaagaaaaaaaatgagattgggtggcttaattttgggctcttgggtcaagcgtcaagtcgggcgttccgccgctacgggttcatgtgaccattgttgtgattgttgtgaatctagtccaccgagagataatcaagccgtctcggcgcgagctacggacgacaaaaaagtgtttcaatgatgcctgcctgttgtgtccggagaacatgcgccagcctatcggctggcacaggtcgtgcatacatgttttcttttcttgcaggctgactctataaatctgccgtttagggttcggaactagtttctcaccagaattcaattattttcgttgtttttcttttcgttggctttcgggtagcaaataattcattatctatcaagtcaattgattcaatccgtatgatgaccggaaatcagcgactgctattgtatgattacgccatagatcgatgtttatagtttgcctcaggcgaaattatcatgtgaccagaataattcacgtgaccgtggtatctcccctctgcaaaaggctatctcttgcaagaactcatggacgcattctggaagctaaattaactaattacagcgaaatgcaagcataacataatacagaaatgtctttgcgcgggcccatgcggcggtcgcacctgaggcaagtgagcgcggcgagcttggaaagcagctccacccactcactggaggcttcgaaccgtgaccatgaccacgaccaagccatagatgatcggactgtcaggctttcatcggcaagctggacgcgacaccaatgtgcgctttgggtgcacgatgagacgttttcgcgtgaagagattttgttgaatccatcggctttcggcgaaactgaagtgcaagttggcgatctcgtcgagatcctacccatacggggctctggcgataatggttattctacacttaagccagaggcagcttcgaaagctgctcgtgagggtcatgccgaactcaactcggcggctcaaacggacagcacctcgaagttcaagactccactgcagagccgttgtttattcgtcgtgaaggccttaccgccagaaaccaaggctcggaatcctcaattggagatctcagtgaccaacaatattgccaacatctttggtttcaagaatagaactcaagttacattggcgattgtggatcgagaccaatgtgcagcgtctcatgtcgatattgcctttcgcgatcaatacatggtccgatcggacatgtggagactagtcatgtcggagttatcagataaaatcatgtataaaggacaaaagatcatgtttatgggaagcatcaaagccactgtcaagaacatctttatccgagagaagaaatgcctttcgggatatttttcgccacatacaatccctattttccgaagcgagtccgccaaatatgtcctattcatccaaatgtcgaaagaaatgtgggactttgactcggagggcactggggacatcctcttcagtcgggttatcaatggtttcctaccggagctcttcaagcgatgggctaattcggacgccaaacatttggtaactattgtgctattcactcgagtcgaatatgataaacccaacactccaggtcagcctaaactcagcgctggaaacttgaacagcaaatttggaccaaacaaagttccaactcgagatttctaccgtgtggtagtaaatgatatggcaagcggccattggacgaccatcctagacgagctgaaaagggaattcaggaccttcttacgagatgtgtcaattctaaaaccggacgacgttgatcctgtatctggtatcaagaactccaagccaaacatggcgaccattgccggacacccaagttcagctctacgaggaaatattttagaggccattcatctcgcttctgctcatctggcttttgatcatatcgatcgcgacatggtccatactggcacctcgatcattgttatcacacccggtagtggcgtttttgaggtctcctacgagtccttggcttctacaacagaagcccttgcgaaccgaggcatagcaattgacttagtctgtttgagtccgatgcctctccattctgtgccacttttcaaataccgggagccagtggagcaaccttctggggattcagggggagctagatccagtgaagtgaacagggataggatgtcttctgagatacaccattccctttcaagcgttgtcagcagaacgtcatatctttctccaagttcatacctgtctgcaactagaatgagggagcgggcaacacctcaagccaaggaatggagctttggcatccctcattggcttgatatctcctattggaaccctgaaacgtaccgagagtcccggcgaatcttgaaaaaagacccaaatgcgccaatctctcttaccgtcactcgtccatcaaaggcattcacgccacgagtgcgtatgtatgagatccaaatgatgggagttatggaaagcgaacaagcaaacatcacaatcccctaccttactgaagggcgcggtggaacaagacctcgtggatcttggcccggctacaattcaggtagtcgcgctccccctaaaacacgtttcacgaacccttcatctttcaagggacaaggacaacttagtgatagccttcgccgggggtcctttgttcaaaacgtggcagaccaaaatgaatcgcagactcgagatacgcggagttcacgaaaggcagtgatgtcttggatggatcaatacgatgaaacccttttctctgtctctccaaatccgcaccagggtactaaagcgcccaaggcaaagcgacccagtgaagcggaagtccaggctgctgggggtggagtgcatgaacggttatctgcccgttctatcacccgccttcgccatcatgaaacgaatccagcagacgagaatgattctttgcactctggtcctcgaagaattgagtcgaatatgactacaccaaaaagcccaggatcggtcaagagtatgtctcccataaaaccagtgttgaaaaagacgccggtgccaatggcatcacgtatttctcggacaattagcttcgcacttcgaggcttgagcgctactcctccgagggccttggcaagcacagtggtaaatgtagaacatgccagtgctatgccgatgacaaaccaaagaactcctgccggatcaatttccgataccaggagcatcacttctttgagtccgtcagaaactgcatcgactacatcggtctttgaggtatttccgacgccttcaacacccgccaagtcgtcccaaactcccgctaagccgatttccatcaaaatgcctcccaaaaatccaccaaaggaatccgaacggccagaggatgcgggcccccatggatcgctgtcgatggacacgccagcgaatgaagtcggtcggggccatggcgatcctccgaacgatcacaatatcgagatcactctcagccatagtccgcgcgagctacatgcgcggagctccccgagcaaagctttagccccgtgggtccgatcggtcaacccatgcaatacccctaaagatgtgctgcgagatattagttggtttggtcgttggcaacatgcgtatcctcggcccccacatgtggctgtggtgaagtggaagagtttgaagtctcctgcggtgcttccattgacaactgaagaatttccgacagctagcgtgcttgcttcagactatctacagacaccatatcgtgtcttcccaaatgaagattccgaaggcattgaagcaccaaagacacgcggggtacttttacgagaaatgatctcgctgcggctttctcatggcttccaactcattgttggaaaacatgtggctgaagtttctgcgcagcccacccttgaatcattaaacgtcttcgatttccgaggtctagagcgcgatgggctcacagtgtttctctccaaaggcaacgcgattcaccgacttgtctgcctccaagggggagaagttgaagtgacccgctttacgcatcaaaactctgcggtgatcatttctcccaaaaagcctacctttactctttatcaaccggcgatgaaaacaatattaagcgcggaatacgaagtgaaggacatcaagctggatccaacctccgaagagtacaactggaactatgccgataattatgtggctggtcatcgagattatctccaaaatccagcgcagcagctgcaattctggcgagtccgttacgtcttgattccgcttcaactccatgccaattctcggcggaatttgcaaacttctcatgaggataacgaagaagaaattcatttgctgggtatcagccaactgacccatatttggcaacgattcaaatacgtgtcgccggaggaaaagcttttcgagacgtcaaatcccaagcgagaccagaatcccttgaatatcatgtaccaaacacgcaatccatcggaaatcgttacggcagagctggatcgtttgctactcactgatccagggctcgacaatgccccggctcagctcttgccggagtcggaactgttggacagatctagcattaatcttatgtcattggcgcaaattatccaaggcgaaaagggcgtccggatgatggaccgacggtggcattggaggttacattataattgtttcattggatttgaattcacaacctggctgttgcaaaacatacgtgatatcgatactcgtgaacaggcagttaaattcggcaacgagttgatcgatcatggcttgttccaacatgtggagaagagacacaatttccgagatggcaactatttctaccaagtctgtgctgattatcgtgtcactcgtccagagtctcgaggaagctggttccctcaacttaggacagacaaatcgatgccgtcgacacccgctatcgggactgtcaaggactctcctgccagcctcaaagctcgatcagacagcatcgacgagcgcataccacagactcctagcactcccaccaaggcgaagaataaggtcgccatcatgttgtccaagtccatgaaattcgatgttgatccgcgcaagcggtcgaatcggccggaagtgattgatcttcattgggaccgactacataaccccgagaattgcttccatatcgaactcagctggatgagcacgacccccaagttgattgaagataccgtgctttcttgggcttcgaccgcagacaaattcgggctgaaattggtacaggtgccgatcgccgaagcctgtgctatcgacaagacgcagccattccggaaaccctacaaggtcacactcaagatcccaccacccaaagggccattgcacactgtgttcaacaatgcgtcatttgcgcagccgggtccaccggatcgcctctactatcagaaggccatattgcgaaagtttgatttcgtacttgacttcgaagcctcctctgcattcccagcagacgttgaagtctcttactcctggggaaagcccgactacaagtacccgcagttcatccaccgaaccggaagcatcctcgcgcagatcaccgacgaaggtgagttccttgtccttgcgaatcggctggtgagcacccgcagcaccgcgagtcgagacgcagcccgctttgaaaaccacaatcggtccgacttccgaggccgtgatggacttgaccgcatctcgccccgactttctccaataacccggcccgttcatgacattggaagcatcggcagcccacttaccccagctggatcagcaagcctcgacgcgggaaacttgtaccgcgctccggaacacattcttaatggcctatctgagttctgcaacgatgcagcccaactagagcagttctactcggagtcgcatgctcgtccgttatccacgaaggtggaatcgactaccgcaaacctaatggatgcatcgatcccgtccctcgagcttcctgccagcgtagtcagtcatcatatcccactgccgccaggattaccatctcggatcacccgtgattcgcgcgacggactgatatcaccggaaattacacttgccagggctcgggcagaaagcatcagctacaatcccagccctaggagtggcagcttacgacccttgatctgaccattcgacgatacccatttgatgctctgatgattttgtacccaaatgaaatgcgatattagtaacaaaagttaccgtgaaaagaatttgattttattcgactctccacgtatcccgtacagattttacatattctgatctcgatttaagaggcgaatccaaaaatatccagcctctcgataaaattcctcatcaacgctaggccaagccaccatgcattttagcctgatatcagccattcagccgatgttcaaaccgcaccaatccaacggtgtctcccaccccgaggatttgcccccgccttatgtgctaccccgagctccagagaatagcggagctctctggcaaatgcgttattcagaatcaggccatcgcggacgatacgccgtgtcaaatggagcaggtctaccttcctcatggcgtaccggcgtaaaacaaaaagagcttggctgcccttcctgtcgttcactttcttcttttgtctttataagcatccaaagctgaaacgtagccatcagtatctggggtagcttgtgcacgaatttcaggaagaaggatatcaattggccttttctctcaagatgaagttcacctcggggatgtggtgtctgcaggtaattttcctcgcttctggttactgaatttggcatggaatgaacactgacacgcaatcggctggcataggatggcgtgaatattgagtggatgagcaacgtggaaagattttcagttgaacacgactcggtcaacctgctgttgaacaagttccaggcacaccgaggaaataccctcaattcgcgtgcgttttcaatcttcccttggtataggactccagaagctaaacgaaaatctatagccaccatctccgcacgggttacctcaccactggagggtgtcatcggcgtgaagcttgtccattggtaagtacctcaagggctcaaaccagagctctcggtctcggtgcttgttttggcaacgactaacagcatacagggctggccaaaacgacaacaatcctcactaccacctaaacaaaaccaccggacacaccaagatccagcacgacgatgctaaaaagaaactcaactacacaagcgggtcactcaatttggctgtgagcacctccgccaatgatctagccttggaattccaatctccagccagtaagaaactgacaggccaatcaccccgctctatcggatacgttcgcgaccagcgcactgagaagcatcgctatgatgacggcatatacgccgagcgccagggatatatgctcgcagggcttgacctcggcgttggcgagaaaatctacggtcttggagaacggttcggccctctggctaagaacggacagacggtcgatatctggaatgaggatggcggtacctcgtccgagttggcctacaagaatatccccctctatatcagctctaaaggatatggtgttttcatcaatcatccaggcaaggttagtctggaggtgcagtctgagcgcactactcgggtcaatatctctgtccctggcgaggagattgagtactttgtggtgtatggcgctacaccaaaggacattctgaatcggtatactgctttgactggcaggccggctttggttccgtcgtggagctacaacctctggcttactacgagtgagttcgggatattcatttgttctggaaatctggagaaataagctgacattgttatacaggcttcacgaccaactatgacgaagagaccgtcactagattccttgatgggttccgtgaccgcgacatcccactaggcgtcttccatttcgattgcttctggatgaaatcctatcagtggtgcgacttcgactttgactcggagatgttcccggatgcgttggggtatctcaagcgcctcaaggagcgcggtctccgcatcagtgtctggatcaacccgtacatcgcccaggcatcgccactatttgaagtaggcaagaaaaacggatacttcatcaaggtatgttccaagacactagcacacaagaaaaatgatatcgaagaaacaaccactaacaactcacagcgcatcgatggctcagtatggcaatgggacatgtggcaagccggcatggccgtcgtggacttcacgaatcccgccgccagcaagtggtacaactcgcacctggagcgactagtggagatgggcgtcgacagcttcaagaccgactttgccgagcgcatcccagtcaagggcgtccaataccacaacggcgctgatcccgaccgcatgcacaactactacgctctactctacaacaagaccgtgtacgagacactcagcgagcgggtgggccacaaccagggtctcctattcgcgcgcagtaccgcaccaggcggacaggcgtacccggttcactggggcggcgactgcgagagcacattcgaggctatggctgagtcactgcgcggtggactgagcctgatgctgtctggctatatcttctgggcgtctgatatcggtggatttgagggtacgccgccaccggcactgtacaaacggtgggtgcagtttggtctactgtcgacgcactcgcgtttgcatgggtcgtcttcgttccgtgtgccgtggatatatggagaggattgctcggatgtgctgcgggattgcgttaagcgcaagatcttgcttactccgtatattctgcaggaggcactgaagggccatggaaacggcacgccgcttatgaggccgcttttcttggagttcccagaggaccttaacacgtatgctgttgatacgcagtatatgttcgggccgaatttgctggttgcacccgtgtttacagaggagggagaggtaactttctatgtgcctctgtctcctgatgatgaggctgggaaatggatctcgtggtttgatcattccaagtcttatgagtctggtcgttggtatacggagactcatgactttgataccatgcccattttaatccgccccgggtctgttacggttaccaatccaacgatcaaggcccctgaggatgatgccttagagggaattgagttgctggtcaatgggcacctgcgtgttgagactacagtcgaaattatcaactcagcccagtcaggcgagatcttgaagactgtccgggtctctcctactgcggatggaaaggctgaagcaagtggtcacagtgtgaaattggtttatgtcgcgtagatacgtatcaaatagagaatgaaaatcatggaacgtatgtcatttgcatcaaattggtcaagagtcatattagaaaggtaggggaatagctcccacaagcggaactaaacctcagtatgaagtgtgtgggtatcatattcaaacaagtcgcaatgcaagatgcaaagtcgaaaaacaaaagaaaaagcaaagaagagaaacgtattcaaaagctcgaagcctaggtctggtaccatatcgggcaagaccaaatcactaaatgctggcaggcgaaagaaaaagaacaatgcataagtgcaataggcatggatatgcaattagtaaacgtaaaaagcttggtaaagcagaatcaccaaacttcttcaacgtcaaggagccactttcggattccttcacgcaacgtattatcagcacctgatagtgctcttctccgctcgcggtcggccagcccgtgcgtgctgtccacatcttcacggcagtgttcggcggtgacaaggcggacgacttcttcgagggccccgagcaccatcttgcggcattcaccacggggcacttcaaggggaggggcttcatcgcctctgggagacggacccttatcttcagctttacgagcgcggttaggggaaggggcacgcgactgttccattgacgaataaccgctctgccccaagacacgctcgacagcatcaactagaactccgtcgagatccatcacaggctcctcgatgaaccgctcttccacaaaggtctggtcccgctcatcagtgacggggccgtggttaggtttatcatgtccagaaaagaagctggtgaattgtgaggctgatgtacccccacggggggcagcgctggcaggcgaagaaggagtatgaggagtcccagagctgtgacccactattatcttacgtcgcaagcggagtcgtttcaccgtagaagccttagtgtctgcaatcaaagtcgtcgcaacatctacccatctcccattcatatccgcatcggatgtgaatgggatgtatggggatggttcagcccgcattgcctgtttgatttctgcttcaagagtagcgtaaggccggaccgcctggagcgagaaatcctcatggaaattcttcaaccaaccagccacatgggcagtcggtccatcgctgtccttcatagtaccggggaacccggagccactgctgtgcgtagaagcaactgcatccatgctggtgacggaggttcgagtcttctttggcgaggcaatcgttgaatcaccggacgaagaaagtgacatgaaaccaggaagtggaaggtcaacatccaccacgccttcctctgctcggactgacaacttcaaaggcgactcccgaacttggctggtgagtgatgatggctctggcgaggcagtctcggttttgtggggagcagcgacagatgcagttggaattgagatgtttccactaggcgctgtttcgggccggtgcccatcctcattttctgtgacttccttgaccatttgagtcaaagtggttgatccgcgtctagcaggaccagatattgtagagacagacccttttcgagcttcggatggggatggggaatatggctcgctacttccggtagatgagccttgacgggagctccaaagaccggagaaaataccaccccagcggcctccagccgaggaaatactgccgtttgtgctcgctgtagagctgtcacaccgttggaggctctttagcagggtctctgatgctaggctctcgttgccttcggctgcactgcggtccgctctagcctgacttgaatggcttggctgagaagtaaaatggggaacaggaacagtactgctctgggtgatcatagaagtagttgcttcgctcgtattcatggcccgagcatccttccggtgcatatttgcacccgggggtttgatagagcgagcatcagaccctctgcgggccgaggctgagttttccgccgttggagttatttcagatccatctaacgaccgctgagctgtctcctgagacgaaacgctcactgaccgctggtggtaatcattatcgcccatgatcattcgctgagcacgagctcgtctatcgatcgctctccggagagactcctggcggaggataggtacagtcggcgggctttgagagatagcacgcagggagggcgatgtgccaggcctgataggggaaggcaatggctccagccgttgtttggagggcaagaaggcggctagtaggaacacgagacgacgagcagtcatcttatctgggcatataatgactgttctgtttgcaagaatgagttcgccatcctgctgagctttgtgctgctggttgtggcggcgacggtaccactccgggccaaggctgttgagccactcggtgtgattgcccaaaaatgctgtcaaaaccactaagaagaagaagttctgctctttgtcgcccaggccacggacaattgaacggccttcctcccgccagacgccccagcgactttgtccagtgaccacatatggggtttgaagagcgagggcgatccggcgagagctgcgaatagcttcttctttgagcttcgaattgaccgatagaatgttagcaggtaaatgcacaatggtctggttggtccgctgcatattgggatgcttcgcaggctttgggtgtggcccggatagagagtccaccttcttcaaaagaaagagaatttcgttgcgaacaagtctttcgagatgggagagtgtacgagtgatgacgtcccaatgatcaactaataagtccagacgctcgtccagactagctgggggagaggcagaagatagactatcgtcaaagaatgcaccaggccagcggtgatcggagtccagcgagcttgaaaaccgtggccgaggagaatctgggcctggagtactaaatcttgagacaggacgtccattgttgcgtggcagcaaggggatctggatcgtaattgcaaccgcgtacattggtgttttcttctccttgatcttcttgcgcttagaaacatccgggaatgggaactccatctcgggcaatgactcttggtaaagagcattggcgtagtcatgtcgttcggccgacgcctccgctccttcgggaagattcacactgaacatgcgagtcaagagaaccgtgactttggaaggtggcttgtcgtccactcctcgggctcctatcggagccgagggattccctgcggtataggcccgggaaagtggactgccggtggcggatgctgcactcaccccggttgccgggctttcatcagcggaaattatgtgcattttggtagacgacccccgatagctgaaggcgctgctgccgaagatgcagttcaaaaggccggtatcattagagtcggaggagtgtcgcgatgagccaggatcatgccatgtccccggtggtgccaatgtagagctacggcctcgagcacgggaaaaggcacctggaccgcccggtgacgaccggcgtgcctctgcagctgcggagaggggactcgagtcgaggagggaggattgaggattgcgacgagttccacgagaaagacttgaggctgctcgagtatgtctaagacccgcctggtcgttgccttgtgggtcgattccaagaccggcgggagaagaatcggacgcacgagtgtcaagtaagacacatgcatctcggtcgcccaaagcattttgtgcgacaatcacacggaaatctttgattgcatccaattccattcccccacgatcatcatatgcaccagcagtcgaggcattcggagaattgaaagtcgtctgcaatgggaaggcatgggtatgagaacgtcgaaggaggctggcgtcggggaaaagaagaccggaggtatgttcctcttcggtcacagactcaagaggcgttccattgcttcgtccagagtatgtcaccgggttcagagtcgacacagcgctactcaagagtcggccaatcatgatgaatgagaacggggaaacccgcagagtgaacaagtacttagttgtagggatagaaaacgggccggtcgaattcacgtagtgtaacggtgggtatcaggcagctagggtatctaggctgcatcaacccatagcttaattcaacgaagcaagaatcatcatcgaactatgagaggaattgagaagatccagagttatgggaggggagtggaagtggaaggtgggatgaggtgcagcagtggggcttggatcagcaattatgaggtagaaattggctttgcacccatgaggactccacagtctaagcaggatcgtgtggaaggcaggaggttcaatgaaataatcccagagcttctctaagggacccagttgctggaatagagaatccagcagagcaaccaccggggagcggaaacgcgaaagggcggtgaagcaagtcacatgatatcagcctcatcacttacggtgaccgatagtgaacattttggcagatgtcttttttctcatataacatcgatttgattctgactctgatagatgccctcctagaaacaaacccgatgtacgacagttagcagtataagaagagcctattttgatcaggtattaccggctattgggactacatccaacggtacccataccaaccactaatactagccaccatgtcgctataaactaccgtcatcgtgtcaccgtatagtcgggtttacaaggaatcgtgttactcggaggcgctgatttgtgtgatttccaacgcatatgaatttgggattggagggaaatgcttcatcttccaaatactactcatgatcgacacatgccacctctacaccgtcactcatacctcgtgtgatacaagcatcatgcctgcaaccccgaatgccacacctcttgacatgctgtaatcatcatgtttttttttttttttcaattccccgacgtgttcgccgttccatccacgtgtttctgcgcttcagccggttctttttcgtttttccgttttcgtcccctgtagtaaattgacacgaggcgtcacattgactgtcagctattccatacagcatgttactatgttgtagcatcttatttgatattttcaatctacatgtgtaaaagaattcatagctgaaagttcaatttcgtttattgaactcggtgtattaacttccaaatcatttcagttctattatactctcagtgagaacgcttgacttttgcgaccaatcgcttcaactcctcggaactagactccttggaggacttcttctgcttcttcttgctatccaggttctctgttggagcctcagcctcggcatcatcaccggtacgtcggcgcttgcggccctcgtccaacagggccttcatgccagaagtagacttgaaccgaggattggtaggatcaatggcgaaatcatgagtgtcgtacagacgtgagaaacggggatcgctgacattgacttcaaagtcatctgtctgggcaagttccaccttcttgcccttcttgcccttgcccttcttccgggcctgtttctcggccttttcaatctcgttcatgtcgaagtgtttgatgttgatctttttgtcatctaccatcagcagctccaactcagctcgttgggcagctgacgcggcttcctcggcagcacgctcctcacgcttcttgcgcctctcctccttgcgtcgagaacctgctgtggcctttccatcggggtcatcaaagaagggatcattgaatcccatttcttcttcctcttgctgtggcacctcggctgggcccatcttggctggatcagcttcattgtcttcactgtccgcggcagcgccatcctctgtagatgacttggccttgagtttctcctttcggcgctttttgcgctcacgctccttccgcacatacttgtcaattgtgctttcttcgatctccggttcattttcgaagatagtatccttgccatggccgccagccaagcccgatgtgaaagtaacctccatctcgccaacggggcgttcagctctggtgcgggtaggctcgacgctcagacccagtaacgcacgcatgcgctgtctctcggcctctttcttggatagctttgtggttgtagcttctcctgcagtattatcgacaacttcgacgcctccgtcctcgtcatccgattcttcgttctcggaactatcgctaccgaggtaggctttcaggtcattctcgtcaatgtcctgacgtgagccccggaaggcacgtgcctgggcttcttttcttgttttgtcatccgcatcccatgtcaatttgaccttgctgtgctgcaaagcatccgttacaaactcagtaggcttgtagccgtcggggatccgagaacactcgtcccgggacttgtcgtcggagaagtcagtgtcctcaggcacgaagcgaagatcgaagaagttggcactagataaatattcaacaccatccaccagatcgtagacatgctttgcgacgtcttttgatgaaaatttgataatggcgtagtaataccgcagtcggtcgagctgataccgccgtagctgtgtagagttgaattcttcaccatcgtcagccttcaacatggacttcttaatttcctcctcctcctcatcagagtcaagttcctcctcttcggactcttggctggtgttctttttcttcccagaagcaaaaatctctttcggggggccttcaacctcctccctctccatgcgctcctttccaaattcgctagggtagactgtggcgttcaacactcgccccccagacggaaggaaactggaaaagactgccatcaagtcctcggcacgaatattttcccaatcgaggttgacaacagctatccgatccgtcacttcgccgagtggcacatcggaccgttgctcgtccgggaactcgatcacatcctcgtccgcctcgtcttcttcttcgtcggagctttcttcttcagatgacgaggactcaaagccgccatcacgggcaggatcatatgaagcagcattgacccgtttcaattctttttggacatcttcgtcgtcgtcggcactgtcctcatcttcgtcttcatcttcgtcttcatcttcatccacctggtaaaactgcttcaatttttccttagtgtcgtcttttctaagctttcgtccatagcgatcgacaggagcgttgctggagaaatccttatcgtctagcacatgcgcaaagcgcttatcgagtttgacgtgagtctggcgtttgctgggaagacggtagcgaggatcggtctggatgttcgcaaatcgaggatccgctacagagacacaaagagtcagtaatcatggtcatgaggtttcctgaaaacaaagtcttaagcttccgctggacgtactgattgctggaccggcttcgcctttggacttgccagccttggactttttcttgtctgagcctgccattgtgagcgctaggaaatttcactttgcataccacgagcagcaagaaaattcttttaatgcttgagtatcaatagatatcgtcggattcagcaagtgaaaatagtcgagaccaataaattatttcttttttttctgccgtcgaagtcagggcggtcaggcacgtgtattctcaaaatggcaagtcttcttttgactttcccatgcagaacaacttgacaacataaattgtaatagtatctacttgaacttgagtaaatctgcaactttttttataaatatgcttttgctaagtgacaatcctaacaacccaatgcttggtctctaagataaatcataaggggtggatcaacatatatacttgaagacgcaacaaatgaatgaatatttcagcatccgaagtatcgcttctctatccagcgcggttctccttcttcttcgatacgtccaacaatcacattgatcctagggtatacggcagtgagcctcttaaggccccgttcacctgctgcacaagttacgaaaacgatcctcccttgttccaccccatgatcaatcaagacgcgaacagccataagtgcagcacctccacttgacatctgagagtcaattagtatgacagttgtatgctcttcgatacgagacggaagtttcaagtaatgcaactccggctcctcgttgctctcgttcgtttgaatgagcaaacgaccagtgagacagtcgggaatggatcgcttaagcgcggtctccatgcaagagcctccacgtaagatagccacggctgatacgatacccttggggtgcaaaccgaggtacgtgctcccttgtggtgtttccacatttgcggatacatacgatgtcatatccagggccctgcaacagtggtgtcagtaaagcaactagaaggcgctatgctcacaggactcaagttcttctgtgggcgtatcgttgggaattgggagcatgaaggagcgcagtacctttcaatcaagatcgaaaccagtcgatcaaagtaaaatatgaaatcctcttgctgggtttctggggtctgcagaatagtattcatgccaataatctgcggtgtcgagggcaagacgtgtacatttgaaggcagctccacttctgctgcaaccaaacctagtttgcgaagcgcttcggtatggttatcagatttctcctgcagcttgcgttgaatgtgtttgaccaccatgtctgaattagttagtgtataggtctcaaaacgagcagctccaggggttgcacaccaatagcggtcttgttctcaatgccacgcgggataatgatgtctaggattcaaaattaacaatggtatcccaatgctttgtaaagtcatatggctaccaacctgagatagagcgttgaggctccacaaaacgagtgtaagaaggcttcacaaattcaaaccattgtttgatgattccttcaatatcccgccctcgctcacggacgtcacgcaagactatacattgtcagctgggttcagtagcccggttgagataacttacttctgcgacctaagcacacatccatatctgcttcaacaaagatctgggccatcaaattagcacggataagcacaatgatagcacagaaactataataccttcacatccaacatctcgacaattctgggatcatggagcgccaaaatcccctcgagaatgatcacatgaggggagtagagggtggtcgtattacgctgccgctggtgctcagcaaatgagtaaattgggatgttcgctttctttctgtgtgatattcagtcaggtcaaatagaaggactctagcaagaacagtaaatttaccctttcttcagatcacggagggtttccaccagaatatcaaagtcaatcgattccgggcagtcgaagtcatattcatttgcgtgggccttgtggtgttgctcaggagttaaggtcttgtaaaatgagtcctgtatagaacacattagaacaaggtctcgatttatatgcagttcacaagctgtaccattacaaggatcaccacccacggcaagttcaaagacttgacaatctccattgccacagagctcttaccggagccagagctgccagcaatgccaataatgctcaagtcctgccatggtggagaatatcgcacttcggtggacgaagaaaataaaggcgagattgattccatgtctacgtgtgcgacatacaacgctgtactttgtaggtatcttgaccctctccacccctctggtttcgattatgacagcttgaaactgtccaggtggggagccccgggcccacgataattacctaatctctagtcccagagcgggttagtcgagggccatttcctggaagttccaagattggctgctcacgtgctgcttatgtcagaggtttataatcaccaatttcggcctagcgtgctactttcgcttaagctacttcttccgccgcgagcttttcacttccttttctctttcgcatccaactcccacacagcgatttgtctttccccatggctgtcgtctcttgggttgccttccagctttacggatagcttcagatcagattcaagactggctatctagaccataatgtctgctaatgttgtatgcttctcggcttgacacccgtggttgctggccttttaacacaatgcagatgtctcgcacttcgtcgactgcgacgcctacatggcatcacttcgagcggaagctcgaagaggtcaaaccatctaaaacgtgagtgacctctattccatccccatccgcctacaccaccgtgacatgatgttcttgaaattaagttgggaatctctctgaaaacatgtgaggaaaaacaaatttgacttatccttctgattcacgtcaccactgcacaattttcattaatccgttgaatcaatggttactgacaattacaatgcagcgatatcaactatttggtcatggattacctcatcaccaatggctatcccgctgctgcgaagaaattcgcagtggaggccaacatccagctcagaacggatcttgaagccatccaagagcgggttgaaattcgcactgcgattcactctggtgatatccaggcggccgttgaaaagatcaatgagctgaatcctcaggtaagaaaatttttcccactagtctacttcacatccctcggccccacttcttgctatgattatacggagtttcatgcaccactcttaaattcccttcggggatatttgcagaaaaacaaacatcttcagtcctcagtatgagcaattgccaaatattgaatcttatcagcatatcacgcattttatgtcatgtgccatggctaacaagacttcaatagatcctcgatgaagacccgtctttgcacttctccctcctacgtctccaactggttgagttgatccggacctgcatggacacacctggtagcgatattactcctgctctggattttgcgacggcacaacttgcaccccgcgcccctacaaaccctcaattcttggcagacctcgagcggactcttgcccttcttattttccccagtgataaactggccccatcgcttgcgtcgctcctggaccctgcacttcgtaaagaaatcgcaacccgagtcaacgaggcaattctgcagaaccagggtgctcgtaaagaggcccggctgcgcaatcttgtgaagacccgggcatacgccgagctcaaggcacgagaggccaaaaaagacatcccagataccttggatattggcttggtcggcgattctcacgacaacagtaacagtaatgaccttgctactaacattcgtgacactctgatgtcgaacaacagcgacattgatccaatgatctcctgatccaacttgcctttcaagctggccttgattgtcacttatatccccctattttgtcaaggcaggatctcctcctttttggtccctcttctagcgcggcgtcttggatccacatttctaggtgttgggcgatggtatctcactagctctaataatatgggcgtttcgacgatccctttgtaatacaaatggctatttcaatatttattttgaccacctatttttctcctgaacatggtagttttgtactccgtagcgtaatatcacttgattatatttgaaaagctccctggtggaatggatgcaaacaatgcattgatgtatgcagcaacaaccagtgtagcaagaatgatagctatcccacgcaataaatcaacccacaatatgaatcaagagtggctatgaaatccgataaagcaacaaaagcaagatctaggagagatcttaagcaaccaaaatacccccgggctcgctgcctgccgaatattgaagatgaaatctatcacaaatgtctctagatcaacaacaaatgacaggacacatacgaggcaaaacaggcttccttagaagctcatgagatctggagaatagaaagtattagcaaagcacgaattttgatagagaaataatgagaaagtagaagacatacctcttccaaagagcgctctcttggcccaatccatggccagcatgcatcgcgtgcggaagctgacactctcagcaaagtaaatactacgccaaagatacatagcaatgacgccaccactgaagctcaaaccacccaagtcaaacacagcagcattgctgatgtacgccaggcttccgaggtgcttatacttgaacgccttgtagacagcctcatcgaggtcaccgtagtcgacctcgttggccctgagaccgggaagcgcggcggcaatcttggtcagtttacgacccaggtacacaccctgttgattagcgcgctgagcagtggcgggcagggacgtgagcttggtgtcgatctggtgcaggagctcggaaagctcgccgtagtcaagagtgccagattggtccttgtcgtatagctcaaagagcagatccaggcgacggagatgatttgtggcttgcgggaagcgtctcttaacccgagcggcgaattcggtccattcagagaaagtaaggtgcactttttcggggtcgcggcctttctcccaggcaacggtgcggaggaacctgatgatgttgtctgcaatgttgttctggactgttgagcagtcgccaattgcatagacgtcgcccaggggagcgccaatcacgcggagatgggaatcagtttcgagagcgtgcttgttgttttggccttccagttcattagagagtttttctgagatctcggctcgggctaaagagatgttgttagacctagtatattgagtaatggcgttagtgcactaaccaactccagtggaccacaagcagaatcccattgggatttcttttacaaccgtcttgccctcttccacctgtgagaaaagaacccggtcattacgcacttccctgacacgggcgttggtcaacacctcaatgccatcgcgagtaaatcggctctgcaagacgtcaatatcagacaaattccgagggggatgtagagaaaacatacctcggcatacttagagagtgcttcgtcgtaagtgttcaggatgtgggttcgactttggatgatgtgaacagaaatctcgttccgtacaatgcgagggaaagaatgaagcagatcttcgtttaagagatcgaacagttcggcagcgaattcaacaccggttgggccacctccacacaccacgaaagacagcaggcgtctgcgctcttcatcagatgtggtggggaggcacgctagctccatattttctagaaccctgttcttgattcgacgagcgtcgtcaatcgtcttcaggaagttacagtgctcaaggcctttcacgccgtgtgggtttgttacacagcctagtacatagacatgttaatacatttttgaacatggccctgcttgttctttgtcacaacgtaccgactccgatgaccagcttgtcgtatggaagatagaaattttttgtctgaccatcttggccaacctgggatatttccaccagcttcgcagagaattcgacatcaaccgcagaagccttgaggaagtgaccattgacccggtcgataatgcgccgaacgggctcaaccagcgaccgaagacccaaagttccaaccgtagcagaaggcaacatgggagtaaacaggaagtagttagtaggtgaaacaacagtgacatggtaatcggcagggttcaagttcttaaggagcgcgacgctaccccagcccgttcccaggataaccagacgaggtttatccttctgccgaagcatagcttccgagtcatagtcgccaaccagcacatcggcaatgggcaggttcttcgggcctccgattcgaggattgagagccaattctgagaccgggatgtccgtctcttcggaacctgtgcggtatgtactagcatcgtaaacgaagaaggcgacgaccacggtgccggaggcgacgacgaagaacccgaagaatgtaaacaccttgcgtagagcattaatagtacgggaccctgccaaacgttcgactttagctgcggtttctgatttgaatcggacccgcatcgagaccggcgccaaggctcggcattggggggctgggcgccgatgaggagtgtgtaaggagcgggacagaggtcggcggaatgtagctgatggtctcgaggcaggaatccgccctggtaatgcccctatcgacttcagcgcggcggcgtccgcacgggtccggtgcagcatcgcgttcaacattgtcatgggaggttgtgtagaggatgttcaacgatggaaaaaagagccgaagcagctcatggtccctgtacactcaaaacacgagcgaccttgaagcaatcgaaccaaaaagagtatatctcacaaaaatttatgaggatacgacaccaactatcaccggcgacgtcatcgtaatggatgtcacgtgccaggagctactcgggaacccggcatcaaaactctgaactcatacgacagtgccggactcggttgtagattcaccggcaactatatctagataagtcgatcttctgtgtaccaatggaaatgaatccgtggaattctattatataccaataactaatcggagtggacatcgggccgagctcgaagaaagcctcaaaagcccaagcgcatgtatgataaagagcaacatagcaaccacccattccggtctcggaagttaaaataaaaaaagccattccccgcgggatgcttcatgtgcagagggaaataaataaacgccgacctcgcttgacatgcaaaaaaaaaaaaaaaaaaaaaaaaagatttcccgtgcatgatggatgatggggaaannnnnnnnnnnnnnnnnnnnnnnnnnnnnnnnnnnnnnnnnnnnnnnnnnnnnnnnnnnnnnnnnnnnnnnnnnnnnnnnnnnnnnnnnnnnnnnnnnnnnnnnnnnnnnnnnnnnnnnnnnnnnnnnncccgcccccgcttgacatgaaaaaaaaaaaaaaaaaaaaaaaagatttcccgtgcatgatggatgatgtggataacgcgagctcagtctcaatctaggtcctcgtccggctcagcgctaggcttcttcttaccggttgaactcttccggcccttgagccgcttgctgaggttggagctggagaccgagctcttgcgcttcatgggccgaggagccaccgtctcgtcgagatctccaacagcgtccaggccgtccccttctgcgtcctcgtctccatccaccctgaactcctcatcgatggagagtagggttgcaaactctcgacatttttggtgcatcgtttcctcgttgtctagggctgtcatatttcgggcaacggcttcccagaacttgtcgccggtcacaccgtgcaccttggtggcagttttattgggttccttcgttgcaggtttcccttctttgttcttgctctgggaatttattccgtagagacgacgaaggtaggttcgagcttcccaaagcattgacaatgatgctgcagcagttgccaacaatctcaatgtcgcagggttcgcttgccgcggtgtgattgtcgattgaggcatctcaagcgcaaaccctggcatcatgttatttgaggcatctgcgtctaactgaggtggaccgattggggtgggggatatgtctgtctcaatcgcgtgtgcaataatagtgcccgttgaagaaacgatacgctccatacacgcgatggttggcacaagttcggccaattgaccgtagtcgaaaaatgccaggttttgggagatgaagcgtgccagtagaagatgttctggggggttgccagttacatccaattttttcggatcgaagttgactttggagcaaaggttcgcgaggaactttttctggtaacggctgttgctgattttgacaatttcaaacaacggcgcaagcttcgagacataaggccgaggactggcgccgttggagtcgccaacaatatcacgttggtaatagaacgcctcttgcacagcccgcatgtattctcgctcaaacatggattcatactgttggtggagcattttgtgcgtgtcaaacgcgattttcgcaattgcagggactgtagaagtctccagagagaccagaacgcccgcgcattcctttgggtgcactaagccctgcctattgatactcgcaatgagttcaatagcagtcagtgaatacgtatcctggcgcgattgtgccacctgaagcatgtttgagagaaagttttgggcgatcaaagcagcagcgccatcattgtcgctagccctcaaggaaccacccaatctggtagtgtcttcctgagcggcggcttctgcggttggcatgacggccttttctgacttgccttcatggatagcaaagaagtctgcaaaagatcggagaacgatgttttgcagacttggggcatcttccttgaaaacctgagcgaaagtctgccgtgtgcgttctctgccgaattgaccaggccaagactggcatatagatcccaggctttcgagagccatgaccctcagttcaaagggtgaattcgatgcaatgaagggaataatagagtcaaccattagccccgcaaccgagccaccggtccaggtggggaattcacttttgaaatgagatgcatacttctcaaggtcgcaatgccgtccaacacaacctgcaatgcgaatataactcttagcgcgacccaggattgcagcatgtgtaggcgaggagagatcgacactcttatactgttgcaatggtttcagtactgaaactgtcaatttcaccagtctgttcgtattttgcagaacactgttgatggtccacaagcaagccatgacttcgttcaactccgagcgggagagcttagcaacactcttgaaaaggtcattctgtacttccttgagaagagtgttgtgggacgaggataaaaacggcaagacgcagcgatagataaccacaaccgatcggaataagaaaagatcatctgcggtagaaaggtgtccgatgtaaggatgcagggcctccagctggtccgaggtaaacagcttcgcattcgacttggcaaagacggtgatcgtctgcaaaagagcttgctgggataccttgcttgatccatctgaatcctcaaccagtctctcgaacatggtagcgaccattgccttacaaactttgaagttcaatgccgccgacttggatttatccgaaagaaccgctttcagacagactctaagagactctagggcagtctcactacgctcagtcagaccaatgacgaggcctacctgctctccaagagccattttcagttttggcccttcagacgaggaatcaatggattcgtggaacggaacgagccatatttcttcgaaggtttggcgagccaaacttgccacgctctcctcaagatcgcctgtgcgttgaaggaaactgtcgagaatggccaacttcagttccttccgaggcgttttgtggtaaatgtccttcaaaagtccgatgcagcgtttgcgaacaccagctgtttgatcagctgcacatgctaaaatgcttcgacatccttcttcttccagcttaggctttagaccaatgcattgtccgatcaactgtaacgcggagtcccgaaccataggtgaggcatctgtcgtacaccgatgtataacgcgcaaaacggaaggatctctgtcaagaaggttcgggtctttctcgagcatgtagatgacacttttcaagctgcggctgcgaaccttggccgagtcaccaaggaaagaggccaaaagaactttgagaatggtgtcgaatgctttgccgaaattggaatttaaaaccgtgaggatataggcaaattttccatgcacgttgggaatttggtcgaattctttatgagtctccaaccagcgtggatctgagaaggacattgtcaaaagagtaactaagccatcagtcacctcgtcatgtgcaatttcttcatggttctcggagttgtaatatagggcgcaggctgttttggcccattgagccaagtagtagcctcgcgcgctggtcagttgccaattgtcggaattcttgtcttgcaaaagatgctcgagcgcaatcctatacgggcccgttggagtgatgaggtcctgatgatgcagtgcgccagaagaaaattcctcgaattgttgcttgaggtaatcagtcaattcactgtcggaatcttccagagccgggagcatgtgctgagcggttgctatcagatctgagatagcagaacccatccagccaagaagctcaagcgccatgctcttcgcagtcgcagcgcttttatcttggtcggtgatctgaatcatgcgtaaggccaagatccggagaagcaattctgcagccggccaatcagccgagcccagtacattgatcagatcttgagtgaaaagatccagaatattccgatatggctggtcaccagttttcgtcgagttcatagcacgctgaacgatgaagttcacaatgtattgtgcagagcgcatggcattgtcatagagtcggttggccttgttcgctaggcgttccaatgattcgtctgactcgccatcagactcaccattagcatgatcctcgccattgcccataagctcatcatcgtcgtcatcggcttgtgctttgattcgacgtttgaccttcggtcgcgagggtatctccaacgcagttgtctgaacaagctgcaagactagcgcggtaagtagttggatgttttttccatctgcaactttgaactgccgggcattctgacgtgtggtggggagtttctccagtgagaccagaatctcatctagaatgaacggtcgctgctcagggtatttggaaaacacctttgcaagcacatccatcgcaccacgtctcgcaggctcgtacttctgatatcctaaagcggagtctttgtcattatgcgcattttccacaaatattagctttgcagcaaagaactccgcggccgtgatcgccccctcggagacatcaatgcgagacagaaagtctgcaaaaagagtgagaaccttcttgctctggtgaacaagagtgctaatgatccgtctctgggaggaaaagaattggaagtgctggctgtctttgccaccaggacgagattccactgcgggaataatgcaatggtcaaatacttgattgagaaccgtgggaatggcctcgatgagatcctctggacaaagatctcgctcagtctgacgcccagacatcgtctgcagcagcgttccgattgcaaatagtgcgttcaacacatcctctatcttacccagccactcctgggactcaagctcaccgaatgaatcgcctaggccaatgtccggagattgtgcagcaataattggcttttcgcacaatttttgaatgcggttaagataatcagacggtatgtcctggagtcgatcaaaccctgcaactttccgaagggccttctgcaggcgagtgtgagcatcagatgatagtatcaatccatgaacttctaaagattttgggttcacgaaaattggattcggcgtgtcaggggttgggggaatcgaagtatcgggttcgatttgatcttctgcttcaaaaatctcgtgtagaagatcttgaagcttttgcaaggctgcatctgcttcctctttttggtccttgagtcgtaccgccgccatggcgtcttggtcatgggcttccggtttaggcttccttacgttcgcgtaatcgctgtgttgttgttgtacgggtttgattggaataacgacggacagttgactcgatgtaagaggaggattcagctcaaaagaggccgagaaaggtgccgagttcgatttgttcgcaacgtatgctcgctgattcaatgaagcaactgtcttcggtgtgaggtctttattttcgggctttgtctttgagggtgcttcggggtctgcggccggtcagtgaattgactataaatatatctgtggcatctcagagcttacatctgaatgcaatgtcggtggagttaagcaccatccgtgcgaaggatccaaggctattaagaccggaagtagcaccgtcaggatcgtttgggcgcaactgttgacttcgcgtgggaacgcgaggaagcttgaatttgctatggaatccaaattagttgactgcctttcaaatatttcacatctccttacaattctgtcagctggtctccatccagcaactgttggatatattctcgagacgtttctaaacgactagactcgtcccgtcccgtttgcatttccgtgtcaagtgcacttagtgttttgcggccttcttggaggacatggtttatagacgtggtatttgaaggccggccaacatcgggacgtaggatgcagtctgtgaatacaagctgtcagaaaaatgagcataattgaggagcgaaagaacgaaccaaggccgaagacaggtgcgctggacatagatgagtactgcaatgcttcatccacagatagcgacctttgattctgaaactgcatattggaaccatatggtggcatctgatcatggccgctgatgaccacctgaacggcgggtcgtccattctggtccatggtcgcggttaagttaaaagaagaagtaggcgcgagtcaagttgacatgctcgtgatagagacatggcaatgaaggcaggcgccctatgacatccctagatcattcaagtagtttaaaaaaccagaatctgaaagaaaatgagctgagctacgagcaactgcgttaatgaattccgtatgggtgacggcacccctattgccgtctgtgaccgcctctgtggaggctcgtgcatcaaaaaaaaaagttgcatagattattcactgcataaggcctgtttcgttatcacttcgcttgcaccttgatcttctgcagtatccagatcgtcaaaaatacttctcactcctcaacatgtctgccattggttccttgattttctgcacagattgtggtaatctcctacgagaatctaccggcaatgcagatgcgattctacactgtgatgtctgcggcactcggaataaaggtatgtgactaaaacccgttattcttgccaggttgatagatcaatcattgctaacttctatttacagacacaatcccccaaacaaccgtgtcccagtccaagccctccgcattcccctccgcactgagagccaaactatcggcagtccaggtcctgtcagcagaggatcggaagactgaggctatcatcgaccgtacatgtaacgaatgtggaaggaagcagatgttctacactacggtacaactgcgcagtgccgatgaaggaagtaccgtgttttacagatgtgtctgcggattcaagtatgcccacccgcctcaaaagcatatatctatgcatgcccaacaaatactaactacttcaacagggaaactaccaacaattaaacttggagtaacggattgtacaaaagatgtggggaaagtctatttttggagaaaggctgtataactagcgggacaagagtattaaaatcacgaccgtcacgagacaaactttttttttgcaggatctccatcatgcagcaacaggtgcagcgctatccgggatcagcgcatattgggtttcgccattcttctcaaattctgccatgtcaagagcaacgatgacactgtccctgaccacctgatcaggatcattcaaaaatttcttcaaggtctcctccacaccctcctcctcgcccaggctgccaagggcctccgccgcttcgtgtcgcaccatccctacttccgaaaggtcactcagcgaggctgtgagacttgggatcgaggcagggtggcagagttgtccgaacacaaaagcaacctcatggcggaaaagagcagagggatccttgaggcccttagccagcgcattgacggcgtcgactgccgtaggaagatctggtggcgaggcaaggtcgcgcaggccgaacatcgcacggtacctttggaacagaggaagctttgtgtcaagcagtgtcttttgcaggtcgggtatgcagggttcggcgctggcatctagaggcatgggtggagcagggtcgatagacgtgaaatcactgtaaatcgaagatctcaatgtcagcatttctcttcatggtatataatctcccgcgcagatcgtacctaggcttcaatttctcggccttgcgctcttctgagttctcccacaagattcgatcgacagcaatgtcgcaagtctcccgaataatctctagttcattcgtatcatccctcaatttcttgaggatatccaagctatcggcgtatccaagagcgcccagcgcttcggcagcctcgtggcgacacatcgcatcctcctcggtatctttcaccacatgctgcaggtatgcaacagactcgatgtttttggtttggccgagacagtaggcaagctcatgcttgagtagcgccgagggtgatgcgaaacctgcggcgatcgcttcaatggcggggagggtctggtctgtggtaggctgtaggcaggccaggtgcttaagggagaaaagagcgcggaagcggcgagcaagcggctcagattcagagaccagcaccttgcggagagtaggaacggtattgtctatttcgaaacccattttgaggagtgtagtcagagggggagtatagaggtggaaaagaaaagttgttaatctttttgatcttatcattttttagagtggggtggcggggcccattcaggcgcatggattttggatttttgctcgtacgttgttgtttttaatgcttccggtgtaagcccaagacataattgttgatagttgcagattagactacctaggtacccttacagctcataatcatgtattagtgtaggtttaagggtggagtatgcgggctctcgcagatgggagcgctgatcttaggagatatactgtatgctataaaaacgttgtatggtgtgcaaatgttccacatgtatacttcagtaggatgcttgagctttaaaacaataaatgaccgagaaaccaaatagatattctcacaccgattgtacacatatcacgagatatatagacgtcccaaacttgtagtcacaactggagtagaaactcggatggattagtttgaagcactatataagtcaatctagcctttatattatatcctttagtatattgtccgtgtgttctctgttcatttagcaggatacttactgtaggctgggatccgaacacggctgttttgataaataccagacagttggagctacaagtattgatcaatagacttgcctagacacctttccaaggaaataagacataaataataaaaaattagcaaagtcatgatcctagagcctcacatgctcatcccattatacaatgctgttgactgggaatttatagcctgagtggaagctctatattatacatcgaggacactatctagttttatactccgatggacctgagatgttggtatcgagatggggttggagatgtcgtgtgatcggtataatgagcataccattagcaaagaggtcgtgatgtcggttagttacattgagacgaacacattgatttgaacctgatatcttacaaaagcgacacgaaaagcgacatgagggatacacatgtgtagacacttcaaaaactatttcacaaagcgcatcaaaaaaaaacaaagtgtcaacacagaagtagaattgacatcgttccctaccttttgctcctggtagttgtaagggagttgaccggtagttggtagccctaactcatgagaccctttatattagaatgtaatatattgaattacttgaaattgaattcgagtggtaaactggcaaatatgtacataatacagcgcgaagtcaaatcatttggtcttgatatgcctgagcttcttgggctcgtgaacgtagttgttggcataggacttgggcacgatacggcgctcgttcggttcctgaacaaagtattcgtatccctgcttctgggcaaaagcgattgcatcttccttcgacttgaacttcaggttggtaccctgcatgccatcggcagacgactgccagcccatgagctggttctcccaacggtaaccccgctgcaagacatcccaatccatgcgccagtgatgctggtgccaggtaccttgctgtgttgcggccttggtagggcggtagatcctgtgggagtcatgggttagtgtgtgggaagtagataggtgatcaagctctaaattcgtataacataccgaacagtgcgggcctgaaggtcagtgggggctccggagagcacggccgcggggagagttttgccgggctcactgccatccatcacacgcttgggcacaggggaaaattgcctgaattgaagccagacttgttagtgaaaggatctgcgacggaaccaaaggggaatgtcgtacgaggtaccgtggtcaatggtggcctcataatccagcttgtgatgggtcatagcctcggcgggggtctccttgttgatcaaggaactgtccttgagaggcgtggtgggagcatccgaggtgttggtcttcacggaaggaacgccaacgggggcattagcggagatgaaacgggcattgacgggcacagcaagtcggctggcccgaaggctagcagcacccccgattctgaatagtgacattatgtctttttgtatgcggggaatggtcgttgccaatgaggtcccttcagatcccttcaagtgtggtttggttgcgaatgacaggcaggtcacgacaccaccgaatcgggtttagccgggcttggcaagccgaacacccgcagggctcggtttgttcctccttcctcctccatcagctttctttggttcacttgcgccgcgaatcaatgtgagtccacgtctctaccaccctgcaaatgcccattgacagccgctctattcattgcgcccaatctctgaccccctttagcctagacaagatgagctacattgcccgccgaggtctctcgaccttgatcccccccaaggtaagagcatccctgttcatggctatttgtagtcaatcgactcttcaaacgatgctaattgttccttaaggtcgcctcccctaacgtgagttacccacacactgccatcttcgacttagtgcatctctgccacacccgtcccgccccgaagccgtttttcgtgaaactcgcgatatgatcaaaatgccgcctttctttcgccttcataactgacaaactctcaatcaaggctatcggtgccgcccaggatgccgcccgcatggagcgtgttgtgaccttctacgctggccttccccgtggccccgccgctgatgttaagcctaccggcctcatccgtcgctaccaggcccgctacttcaacggaaagaacgcctccggtcttcgtacgtattcgtccattgggatcttgtattgatacaagactgattttcatgcagcctttgtccacgctattgccggtatcttgatcatgggttacggcatggaatactacttccacctgcgtatgtgttccagctattaccctgcttatatatcctctatatcgtggggacatccactgacttgatttctggactaggtcaccacaagaaccacccccactgagctttctctttccaccgaataggtggaggattgatgtatatactggatcctctgtcctagtgcaagggaaaaccgtggttttagcgagaactttagaatctcactgtgtttcaatattcagatttaccatcctttgttgttttttagtagatttggaagtatacatattacgtagaagcttgagtgacgggctctttccatagtttttcatcacatacaaacttcaaccggacatcagaaattctcaccatttgcaagcaacgacatcatccataaaacccaccctttataaaccaaacgaaccgtcaacaaaactagggctttcgaagagatcttaaggtgtgtgggcagacagacctcgcaactttcgtacgggccacgctaaaccgaaaacagcgaccctcagcttcaacccgagctgactcttgaatctcgtatcatccaccctatctttgtatcatcaaccgtccttacgcataatccctccctctttgccctaatccctttctgggacgtcttgggctgcggacttcccaagacaaacgcgcctatcgattccgcgatcgtgctctccacaccaagcctaacttaacacgggctttctcatcatccgagagagttggccaatactacatctggttgtgatatcccatatattcagggtgcaaccagtcaaggaaccagtgcaactgtggcgatccttggtatctgacgataggtatgtctccttagaatctggcatgattgatctgcagctgcctattacgaccctgatctatctccccgctgtcagggcacttggcttacttgttcgcaattattgtatggaatagaatcgagtattgttatggcagagcagagcaaccgcgatgtggtagatcagaccctgtcgggcggcgagccttcgccttccgacgttcctgcgagcaccaacgacaatttatctgctggaggggacgcagggaagaccgaacatatcgcaatgactaccgctacatcgaacaactcaaatttgaaagatcagcaaaaccatgataaaacgaaccctcctgattcacagggaggaaaagccgccggtgacaaggatactggaagctcgacgacggtgagctcgcttctggatgcgctacagagaacttgctaatacgggcgcaggatacttctaagcaaggcaccggagttgttgcgactcgagttcttgaacttaatggcctggcgtcggcatcggacggcggagaggatacagcatcacaaggtggttcagaatcggatgctagccgatcagacagcaggaatcccactcacggtggctcagtcaaaaaaccagcaggattcaagccagtttcatttgccaagttttcggtaaacaaggttccgggggctccaacacaacctaaggtgcccgagaaaggtaacttctttgttaaactgtctcatagttggctctaacgtgttcagcgccgacctctacaacaccactcggcaccccacagccaagctcccgaccgcgcttggttgcgaagactacactcggcatgcgcgattcgttcgcgaaggctggagcaggcggaggcaagcctggtggatcagggcctgatccaaatcaagtgtggaataagaatagacgtatgtattggtcatgcgatgcagtgaaaccacttgaaaactaactgatatccgtgtagctgttgtgcccgctcctccgaaacacttgaccgatgaagaattgaaacaacaatacggaattcatatgacttctcgtatccaagaagatggggctgttacctccgaagcaaagtgggcagatattgatgatgatgaagacgattgggcgcctgagacgattgagtggacagacggaactaaggtcaatctcactcaacctcacactgaacccccgccggctcccagtcatcgggagcctaaggagttaccgcctgcggaaccaagcatagtgaaggagcccgtcaaggttgcgccgaagccagctatatcaatgggatcccgtgccatggtactcaaggttggagcgaacgctgaacggcaagcgagaactgcgagtgcttcttccaacggtacgaatgacaaagttccatctagctctacaagcccagcacctccgtccaagtctccttgggccgctctgcctcctgtcgaaagagtgtctccagtcaatggcccggtccagcctcaccaacagcgcatgcccgtgagatacccacagagagatgacggccatcatgcctcaatggcaatgccacccaaggagattgcagcggatgatttcaaccgtgcatggaaagatcagtcagatttgccccagcttttcaatcctcgatcttcccagtatgagccggtgggtgaaaccaggagaggaacttggcgtcatgaccaacacccccgtgctcctgcagttttgcagaggccacacgatcatccgagtggaccggcagagccatctgccgcattccagacgcaccgatctagtcatcaggacggtatgggctggggtggtcgccgtcgcacatcatcaaacgtgagcggaggaagcggaggatttggccgtaggatgtcagctggccgatttgatgcccctccaagatacaatgatgctcgaagaggttcccaagtgaacggtctaggtgattcagcaattgtgggtcacgagcagcaccatggcaaagacgaaattgctccgtctggtccaaatggtatagcacgtccagctgttgatgtaggtatgtctcctgtggaaacacaggctgcgattcctcaagttcctcaagttccgcaagaacctcaggaggaccctgttgctctacaacagcgtatcatgaaggagaaacttctagaggccaggcaacgaagaattgagcaggaggagaaagaggaagcggctaaaaaggagaggattaggcaacgtctcgcggcgatgggtccggcgccagagaaaaagactcccgaatcgcgcaaccccccatctcttcaacctcaacctcaccatcactctcaccctcttcatcctacccccacctcttctcaacttcctattcaacctctccactctatttcttcacctcccaaaccacctgttccagaacctaaccgggaaccaaaacagtatggtatgatgaaagtgcatcatccagactctgtcaagaaactcgttggtgcacatgaccggaactcagagcaaaaacatatcaaccgacgtgtctcttcaccccaccaagaaacccatcgcgactctgcacccgcatctgcctcccacttcaaaaccgaacctcactcacccgtccagaacaagacatctgattcaaagctcgacgagcacggtactcagtggcaaggcaatttaacttctacttcgccgtggtctcatccaaatatcactgtcccatctacatctgcgaaaaatctatggaaaccgtttggcagtgaccgcactccaactctcggtaacggcatctttgatcaacctctgggaactttcacatcacgtgaaaatcctctaggccaacttggcttggatccgtcaaatatggcttcccctcccaagttctctgctcctaaggagccaaccgattctttgccatcacctgaggcacgtcacccctcatttgaacccctcaatccaattggacgccctagtccgatcggaccaccgagcacacggaatacgaatactcgtgccattaccgactggaataacttccacgagaacgctttggaaaaggaatccgagaacgcgaaggagttcctcaagcgactcaacgacagacagaagggagtcccagcaccgccacccgcacctgtggtttttactgagacttggaagaagacccgtgccactgaagacgggagacgagtcatcacccgggtcaccgaaagggttatcaacaatgaagaagagattgccaaggccaacgcggccacaaaccagcaatctaaccctcttacgagtctagatgctcctatggatggcctcaacgtgtctgatatcggtgttcgtccagccggcaatgtttctacccggagctcccgattcttcccctcggcatctgaacagtcgaaacgccaggtcgccgagaaggagcgcagcagtccttcgccccctcctcctgaggaagttagccaccctgtatattacggagacgcgaagcggccccatgttaatctcccggcccctaagcctcccaagcccgtcgtcaagctcccaccgaaggccattggtgtcccagcgcccccgccaacatttgcttctatggcagctgcgccaccacgtcatgcggtgcctccttcttccactgcgctttcgtggcaggacaagatcaatggtctcttcgggaagacaactcctactcagaagaagagtgtcttagctgtgacatcagctaccaaggagcctcttcctgttcacgctactgctgtttctgtctctatacctcagaccaggattggtctccaggctggcgatggcgatttcgccgttcgacaagtcaatgaacaggatgagatgtttgaagaccgcgaacccggctctttgcctgccgttcgtgtgccgaatatggcgccccagaattcttggagcgcaactcgtccatcagagcgaccccgtgggaagaacttcaagccggtgcaagcgcagagcattcaggcattcctggttggacacaatgatcgggataatcatggtaatactcgcgcatcggttttccttccaggtggctctgaacccaaagtcgttctcatccaacgcaaggctggatcgacccgaggccgcaatatcaataccaatgtcagaccccgcaagggagtcaacaacaagtctggggaagtgtctggtggtggcaacaagaagcctccctccaacaccatcccacgacagcaaccccgtcagcggtcgggctggagcccagaaccccccacttctcattaagaagtatcggccttgcaagcatatggtttatctgaaagcgttttcggtatcttctctctggttcatttatcttgcctggcaggcgagaaattggggtcaacctcgccaactcctaatcaacatttgtttccgactcttgttgccattgcccacttcgttactcgtttctgaagttgggcccacatttcagatcctccctctaccccttcacgcattcgcgtttctcatgtacttgtgatttccagtttctcacctattgtgtcccctccccggacccattcggaattgcggcttttcttttggcttttgatgtgtggacgatcaccgtctacagattcgacgccctgtttgcgcgatcattgcccaagtggtgcatgcttgttctgacctagcagtatcacattgccgagtattcagccaaatccgcacggatacttaccaagagaattccattgttacacaattccatgttctttttctgttgtaaacgtaatctcgagctctcaagataggcaaataaggtgagctaggtaacctcttaccttcagctgggtagtttcgctagaataaacccttacaccttgtaattagatagcaagatggtgaggtagatttcgactgggaagttgagggtgaaagtgaatggacaacgctgtcgctttctcgatgagattgtggaagtagtagattgatggttcatattacggtggctttactggactcacatcagaagaagacaaaaaagttctccatctacgacgatttgacatactaagtgatgaaagagtttaataaacaacaggtttagaagtataaacagaggatagttaaagatttaaacatatgataggtatcaaccgaggaaagcccctacaaggctcaaaataaacgccttgtccctggaatacgccgcccagatcaacccaaaggtcaaaacaatcgaatcaagagacatggtggcatttgtgatgcgacaagtctgaagatgaccatcgtttcgacgtccataacgcccccaaaccaagcccgaacatccattagataaccacgcatattaaaacaggtcgcatgatattgaacaaaacgaaagtgagcagagatttctcttcaccagttccaggtccggctggaagcagcaaagacaggaggcttccactggagacgggcagggtcaattttgcgcgcgcccttgatctcctccttcttgagtcgcttttcgtgctcctccacgacctggtccgtgagtacaatgacccaattacccttctgcaaagagagttagtaaatcacacggtattgtatgtactgcagtacagttatacgtggaaatcagacttacgtggtatcggagcatgttgaatacaactagagtctcgtggacgtccttctcagtcatggaagtgagcaccgcgagctcgttctcgcttatagcttctcgggtcggctcgatcaataactccactagtgtctcgcgccagtactgtcgataaccaagtagacccaaatcactgagtggcttctcgggggagccgagcttgccttcacgcttgctgagctcgtagctgaatgagatgagcagacggccgaagccgcggcgttggtattgcggcaaagtcataatacacgccagattatacccctcagcggagtccttctccttagagaagtagccgacgaaatggcagccggtttcgtcgcgagtcgtcatacaatagaacaggaatgggtcgacatcgtagtaaagcgtcttgtggtcgaggaagagcttgctcaggagacacaggttccggcaccaggtgcgctggcgacggccgtcgacttcaaagaaggagatatagtcgtcgcggtaaatctcattaccaggtgggtgggtcaaggtgcattttgcgcgatggcgctcgaaagcacgcttgttgtcaaaatagctcaggcagaactcgtcgatgtagactaggtcgacgtccgagaaggaatccgggtacggcgagaagtaccacggctcgacgtcgtacttgcccatctggaggcgggtcaagtttcgcacgcgatggatctccgtcgggttctgtgtcatactaccacctgtgcggagtcgctcgatttcctcccctcgtgtaatcacctcgcctgtggtcgtttggacatgatcttcttttaccgatttactttcagctgcagcatctgccatttcgaagtcttctgactcggtggccttgggtgtgccggctgtcgaaacagcctcagatgggaacatcgatgagtctccaggtgtttcgacaccgaggttttctttgcctccagccttcgagggccgtgacaacttgccgacgttcgcattattgccgcctaagatatcgggtgtttgtgacatatcacggctttcagcccgagcacgcttatttgcattcacattcttgctaggcgccgctttgctggcagcagcggtcttctttttatcagccttatctggctgaggccattcaacttcttgggagagatcgatgcgagaagacgcaacccattctgacaaacgagtcagagaaaagtccaaatgaatgcatttgtggaagtgggaacttaccatcaagacgtttgttaaaatcgacatagtgtacgctgggttctatatcagcaccaattcgaaaaaaaaaaaaacagacacaatatgaatagaggcaaacatactaaaaggaaggaccatcctttcgctgtctgattgacagaatctcagcttttcgcagttctccgtcctacatagaatagtcagtatcaaagcccatactgattgataatcacgtgatatggacacaaaaatctgcgaccacaaggccagaacgaaccttctgcaccatggctttcacaccgattctacaaagccagttagcacttgcgaccgatgaaagtcgacctaaaaagcccaaggctaattattctggatataaaaagcgacatacctgatggtgttgagtgtggcgaaccctctgtcaacggggtcgggcgtccccgtcgtctccccgtgggaatctcggacgcccatgttgtcggactggaagttaggattgaagcaatatcagagatgggaatgatggaatcgagcagatactgtggtcatttggtgatggggaaatgatgcgggaaagggagcaaactgggtgattgttatgtaagctgttccgcatcggggtcccgagtctatacaggacttcattcagctgaagatttacagagtacaactatattacaagagggggagggaaatcttttcatttcttgaaccatcccaaatgataatgccataaacaccgtctcccgtttgcgggatttacattcccttccatgttgtcatgatcttgtagataaaatgcaaagtccaaacctacgccaagcgccttgcaatgaaccagagatgaagagcagccgagaaagaagccatgtgctcaacctaaagactatatacgtctttcccatcacccctcaaatttccgcttgacaccattcgcatttgcggacggtggcaaagcttgggctctccgttttttgtcctcacccgcagcagccatattgtgctggcgctgcttccaagctgttttgatgaggggagcaaggcggatgagatcctcttcagtgacgcggtcctcaatactttcaagaaccttttcaacagtggagatgtggttcgcatcgttcttgtcatcacgaagacgatggaagcgccagcgtccttccatatctttggcgcactcaacaatagtgtcatcaagaggaatgccaagagctttgagatcttcccattcctttggctcgagaaacatctctccaaaatgacggtactcaccagcattgagcatgacgaacaggtggcaggttgggatagcgtcgtagtccacgtagggctgggtgataccatcagcctcatcctcggtatctggctcgagtgtcggaaactcaaggcgcatacggaaatcaacagtgttctcctggggtggcttccatttgaggatgtgctcgtcggtgccgatgcggtacggagtactgcggcaagtaaagatgagaccgtcgttgccgtgaatgcgcttgaccttgggaatgatttcgcggaacatcatctcaaggccgtaactaaattgtgtggatttgtcctcgactgcgaatgggcggtgattcttctcctccgggaatttgcgatacatggcattgtatggcctgagtaccttctccttgaagtatgctagacgcttatcaagggtacggtgcatcaagctttgcccgtccagcaccaggcagtcgaagaccagatatttcagctgggtggttccatcctcgtaggtgtcgttgacaagctcgccgtcaaccagggtgtcgacgtggtatccctggaaactttcgtcgttcggtagggggaagtgtaggccgggcacgtagcggtagtcgttcttgcgatcgatcaggtaatgaatctcgggcatatcggagtcgggatctccgcgcgcaaaatacatcaggcagcggataccgtcggtcttttcgcagacaaagtagtcctcccgctgtagctcgacaaggtgccgcgacgagaagctgaccggttgtgcgccagggaagttgaggttgttgcgcccgagaaggttggcgacttcgcggcgaaactgatcagctaggtcatggtcggctttgatgccaatcgcgtctagatcggggacagcgtggctcattgtgaaaagttgaaggttcagagggactgggtttatggtgtaagaagctcaaggatgagtctgatagtcctagatttccagagttgagaggggggtcgagctgcaatcaataagactcggaaagcttgatggtggagtagcaaatgcacagggcgctcgcccgcaatcgcgacaatataaaccagacgcttttcagctgcaggtggctttggaaataacgaataaagaggatcgcccaagggtcatagtatggctcgctttgctcatgctgtcaggtctcaaagacaatggatgatcggcgaacggaatgagatggatgtccttatgcctcaggcacacctcacgtaatctgaatagcttcacgccctgggctattagtgcatagcgtattcattggggtgtcctacatggttacagatggcatttatgcttacagatttattagacagagctcaatgaggtagaaagtattcaatcgcaacaactttcgaaacttgaatgtacatatcacgccagtcggggtatcatatcgtcacctttcaaagcagacagaaccagcctgtacccatggcctatccagggaaatcgaggaactaaaaagatgcaaagaaatcaaagaagaatagtacagtcagtagtcctcctgcacccatgaacgccagcatccagtatccagtacacaccgtaaaagctcaaaccttttcaaaccacaaccgcaaacaaaaaaagagtcgtcataaatcatcgcctgatatgcgcaggttgattgacaagccaatcaagaggcagaagtgaccggggttttgcggctacctggaacagcagatcttttgcttccatccattccaccagcagagatatcaggctccccaatggcgtcaaccgatgaggatgattccaaatcggtcgcgacagtcgagaaaagaataccaccgaaaagaggttggctctcctcgttggagaaaagtccaccgccgtttcgaactcccatggcatgcgacatctgctccttgatgcggacatatcgatacttcgacttggtggtgatgacggggtggcgcacaaggggttggggcgcagaacgggcaatggcggccatgacagcgtctctttcttcatctgagtcaataggaccggtgttctcgatatcttcctgcagaggagcgttggcatcgatagccgcctctgtggttcgaatgggttagtcatctcgtgatctataggagcagcataaacaagataatagcaaacttactctgctggcgagcctggttcttcttctgatactgctggagaagcatatcatatggcagtgtccggccaggaaccgaacgcttggcacccattgaatggctcttgcaggtcaaggaacgagcgcactgcgcgccgttgggaagagtgacaccgcactgtttctcgacatcgacagggcccttcggtttggccgtcttttgcttgacctcatccttcttcttctttttctttgactccctgccatcctcttcatcggccttgcgcttcttgcccttcttgttgccgtcctcggtacccttggcagcgctctttttggcgcttttctgacccatgttagggttttctccgtcggccttatcggcaccgtcatcgtctctatcatcgccggccttcaggcgattggccgcgtcgcgggcttccttcttcttgcgcgccttctcctgcttggccttcaagcagccgcggacatgatcagctgcggtttgcttgagagtgggccgtttgcaatgcttgcagatgacggtctcgaggaggtcatcttcacgcggcttgccggtcgggaacacggaaacgactttgctgtcgagggagggaataggagaggcggtaggggaggtatcgatagggccatctttggcttctattagtttgttagtatcattaattcctgtgaaagcatatccagggagctttaccatctgccttcttcttggtagacgccttggacgtcttcttcaccttgatcttgccgggtttagtatccttgtctgtgaaagtgtacccggacgcatcaacaagacttccccgtcctgtcaaaaaatatagaattagctcagatcatttgtagatcgatgcgccgaacttgatctcgaagtatcctagatgctttgcgcttgacaggaactaggtattgcttaccttgaccggggtcaccattgttcgccatggtgagcgcaaagggagagagtaccgagagacagaacgctttcttgtcactcggaaagcctttgaaatggcgtgggggtgtttataaaggaatgagttcagtcgccggagtcaaggtcgggctgggctccgcgttaggatcagtcacgtgccatctgttgatctattgaataggcactttggcttctattttgctctgcgtgtaacatttaattctattgatgagaatagctaatggtagagactgatgttcttccaagcaatttcttgatacagtacattgttggtcaatcagattaaccaggcagcgactctttttatgttgtaggcaaatcagcacctgccaagcttgtaataagagagttataatttgatggcattcaggacgttaagtatcgcatatagaattgaatgatacgctgccctaagaaagagtagaggcttcatctttataggctttaagattaatggtaggccgaccagcatagaataatagtcaagtcaaaggtagcatacttagtcgcccgtgcttctggctccaaaaacacattgttgtactcaaacaaatattcatacaatatcatacatgttagaaacaaatatcatgaataatgtgcaaagcaaaggctactgttagtgccaccaaaaccaaaactatttgtcaaggcaacatcgatctgtcgtgactggggatctttcggcgcatagttgcaatcaaacccatcagccaagcgatctaggttgatagtaggtggcatggtattctgttcctcgttagcaagaacctagcacagcatgtctagtgtacagccactcacctcatggattgcaagtacactgatcaaagcttctatagcaccagcaccaccaagcagatgaccgagggcaccctttgtgctgctgacgttcacatcagcagccttatctttaccatcagggccaagcaggagggccttgatagcagcgttctcagcagcgtcaccgacaatagtcgaagttgcatgtgcattgatatagtcgactgcagcaggacgtaactgggcttgcttaagcgcctttttcatagccataaacgcgccttcaccattttctttaggcgaggtcatatgatgtgcgtcgctggagcagccataccctttgagttctgcatagatccgcgcccctcttgccagggcatgttctagctcctatactttaggcgtcagtatcgggttgtagtatgcgtataggcaggacatacctccagaaccatcacagctgcaccttcgccgactacaaagcctgcacggtcggcgtcgaacggccgtgacgccttctctggagtatcgttaaaccccgtcgatagacttcttgcacgcgcaaagccgccaatggccaaaggatggatacaggactcggcaccaccagcgaccattacatcggcatcaccgaaggcgatgaaccgagctgcatcgccaatggaatgggcaccagttgtgcaagccgttgttgcggaatggctcgggcccatgaacccgtacttcatagagatatgcccagcgccaaggttgatcagcagcttcggcacgaacagcggattgacctttttgtagccctgtgcaataagttagctgtatgttcctagatcttatacgatataaacttacacccttgtcgtaggcaataactgtgttgtagatttcatcaaaattcccaatgcctgatcctagacagattccctatcaaaatggttagtatagctgtcaagcttcacatattcccacacatactgtggcttccctctgctcaaaaagcttgggcttccagtccgcatcttgaagcgcctcttccgtcgccgccatagcatactgtgcaaacttggccatcttccgctcatcctatccattccaaagtatcagcatcacaaataaatcacaaatcacaaagtgaagatagctggcttacaccccgactcaaccattccgaggcagtccatccaccattatcgcgattgccctgtgggacaacggcagcaacctgacagggttgctcggcgaagcgctcatcgcgatccttcacattcacaacgccgcaatggccatctaacaagcgtttccatgtacgccgaatccctgcagccaaacccggtgttagtcacagtaacatgcgcatgtgaaacccagtatgtatacggcgggtaatgtctcttatcttcccggtccgcattcccctcattggctgtcacgaccttccccttccggagtgggaagtggagaacgaagaagctcgacagctcggagtccggggatatcggatagagctcccggacaattagagatggatagagtgtgctggcattgtcttgctgacagataattgccgaattgtgtaattgcatgcattgtacccggtcacatgtccaggtgagctccaaggatgacctcgaagctatcgatgccaaaacaacaaaacaaaaaaaagaagcaactcacctacacctagcggtgtcaccgccccaagaccggttacaacgactcgccgcattgcatcgttaataactttgtataaaagctatcggaggagttgtcaaaagaaagaaaaccgaaaagcgggccacggccaagaagggaaagtcttcacgatcgggacaaccctatctgttcgtctttccctttacaacactactgcttcaggaaacttgacgagatgggggttatgtagaaaaataaatctcttcatttccatcttctcttttacttcatcccattaacttcagccatgtctgcttggaaaaccttcctcacactggctttggccggctccgcggccgcctgcgcgcaccacgataacggcgaggtagtgcccgaacatgagcgggcggaattactcaagaagtgggatcaggaggtatgccaatgctagaatatctaaggaatgaggtccgaacgactgctaacatgtaactatagtggactttctccggcattgccagcttcgcccacctgaagccggtcaggtgtcttatcgagcccgatgagaactacgacattgccattatcggtgcaccatttgatacagccgtcagctaccgacctggtacgactcaccaccaccacatccaacatccaaaccaaacctacgaaacaaaatactaacaaacccccaccaggtgcccgcttcggaccacgcgccatccgcgccgcgagcgcacgccaaatggccggaacaggctacaacacgcgcgccgggatcaacccctacctatcctgggcgaagatcaccgactgcggcgacatccccgtgacaccgttcgacaacggactagccgagcgacagatgtacgaagcgttcctcgagctcggatcccgcagcatcgtgaacaaagcacccaaggcgaacgggatcggcgcccagcaccccaagctcatcactctaggtggcgaccacagcattgcgctacctgcactgcgggctctgcaccagatctaccagaagccgatcacggtcgtgcacttcgacgcgcacctcgacacgtggaatccggtgcggtacagcgcgtactggcagtccgagcagacgcagttcaaccacgggtcatttttccacaaggcgagtcgcgagggactgatttgtaatgctacttctgcgcatgcgggactgcgcacgagacttactggtgttgatgcgggggattatacgaacccggggcctgagcagggattcattcgtattcatgcggatgatattgatgagcttgggcctatggggattgttgagacgatccttgcgcgcacgggcgttgatcctgagcagcctgtttatctgtctgttgacattgatgtgttggatcctggtacggcgcctggaactggaacgcctgagcccggtggttggactacgcgggagttcattcgaatcctgcggggtttggagaagttgaatattgtcggtgcggatattgtggaggtttcgccggcttatgataataagggagagactactgcccttgcggcggcgcaggttgcttttgagattattactagtcttgttaagtctggtgttgatgaggagcttggtgggtggtatgggtggatggagcaggaggagagaaagaaggagcaggagggtaaggatgagctttgagtctggacatttggacatttagatctacgagatgcatgtggaatgaagtgaagaatgaatgatatctatttgaatgattccttccttgcctgtagactggagtgatgtcatggcacagtaggagcctgaactcatttagcctatgatctcacagactcggacgggagtaaccttggaaatacaatatcaaaatactacaagctacgtgacagatacacgttcaacccaaatgtcttcatagaactggttgtattggagtctgtaactttctaatgacccaaaataacgttgctcttcagtgagacataactcaaaagactgcaagagatcgcagaaaggacgtaaacgaagacgcttgtatcaagaccgcgcgcatggagagtgatggcgattgtagatcagattggagtagaggaaatcacaagcaaaaagacgcagagaagaagccggatctgcaagggaagggtacagcaagctcaaattcatagtccggggtcgcaaagctggggtacataaatagcacgcgaagaagaaaaggacaggggcatatgggggatatgggacaacattgacggaaaccgtccagccaaaacacgacgccctgacgtccaacgccgagagagacgaccgaagaggtgaaagtgccgggtgcggagagggtaataggtgatatgtggggagtgtagtcgacgcgacaaaaaggggagaagaaggtcaaaattgctgtcgctgtagttcgtgaaggagaggaatgagggtagaggatcgggatcggggaaagtaaaaggtaatagacgagcaccgaggtagctctagaccaagtcgttgaatatggcaggtagatgcggccaggcgaaccaagaagaaaagtagaagcagagatagagagcagaaaagggacaaggcaaactagagagattagggctcgaaccgggatatgcgaacagagacaaaataagagagaaggaggtcaagaaaaagcacagaagccattttcaaccggaaaacgtagatatggaacgcttcagatagcatcgctagccataatacaagaccacactcctcccccttttttttgtcgctgaatttggatatcccagaaaaccagtccagtcagaaatatttgccgcccaatagaacgtgaagagtagaaaaagagataaacaggttcattccatcgtagctgcttcgaggcgcgcgtcaaccaggcatcaacccaagtgcaacattatccgtcgcactcggaccaacccgttgcgataaatccgtgaagggtaacttcacagcaagcggcagccccttgacttcttcttgggcgcgggctcgagtgccgcgacaatagcctagaaaggtagaaagatacggtgtcagtggcggtgtggagatgtcgggcagcaaaattgaaagactcggtgtacctcatcaaagacgtccttcagcttgtactgagtcagggcggaacattcgacgtatttaacggcgccgagttccttggccatccggtcaccgtcttccttgcggatgggggtcatcttctggcgagcgagtttgtcccggactccggcgtcatcgcgtaaatcggtttgtgtgccgacgatcagacagggcacaccaggacagtggtggtgcacctcggggaaccacttctcccgaacgttttcaaaggaggcgggcgaggtcaccgagaagcagaccaggaagacgtcggtctgtggataagagagcgggcgcaggcgatcgtaatcctcttgaccggcggtatcaaacagtcccagggtgtaaggctcatcgccgatcctgaatttggagagcgatcggttagaagtgtttctttgaggctagactgacgtataacttttttcttctcgggggggaggggtggggagatgacttacatcacggtcacggcgtagttgtcaaagacggtggggacatattccgaagggaacttgttcgttgtgtatgagatgagcagacaggtctttcccactgcaccgtcccccaccacgacacatctgggttggggttagccatgagatctggggggtttttttcgcctcggcaaagagtgaggagatgaagcgagatggaatagcgtacttgatggtagcgacgaccatgttgaattaatgagaagtgttgatgtaggagtgttagagaagagaagtgtgggagacaaaaagggaggaagaagctgtggtctggattgaatggggcaacccgcagagtatggagtctagacacggtgctagtttcgatacacggtctgtacagcactcgcttgcttgaacagcttcttggtattaattgtgttctataagagataatttagatctagcattgtcgtttctcatattttgcactattctatatgatctaatactcattcactatgatatttgctgttgatgtcattcattacttgccaagagaacggtatcagtatctcgactataaatatcagctcaagcgctaatcccctattctattctttacaattgctgtatcttggagactcgaatttaggatatgtaggggaatgacagcttcaagtcagtaacaggtgcaagtacgaaacacccatcaccccaataataccccaagtaactataacttcagtataactagttaagataagccccgtcgaggaacaaaaggagacccccggggtgtttaccccctttttccttcgagtcgactatttctttcacccttttggagaaaagaagcaacatgggaaataattaaaaaaccccccaatttcattctcgtttcaccattcacggtcccccggcctcccctcggccctaaatccccccctttccaaaccgtcgttttacatcgtgtgatagagatccgaggacctagatggataccataaaatacaatccatagtacattcatacggttgacgatccaatccagctctcattattacctacgttgtactccgttctccgtaggtgccttgtttccatcacagcttggcagcccgatccaggtccagtctctgcacgactagcttcactacgttggcagagcttgccctggcgggtgcctcatattactagctatctaagtatagcgacctatgtcacctatggttctgattgatggcctgacagctgacaactgacgatatattgcaggatgcgtcctccatacggaatacctccgtacaatatacattgattgacagtaagcacatgcacatgctaggggtgccgggcagatccaattgccatctcatgtatccccaagcccctccgtcgcggtatctggtctgcatgcatgcatatatatgcaggtacataggtacatgcacgggtaagatacgtggataagacgtggtgcgtatgagagtcctggtatacgagctggataaaggcggggtgataggctggatggagaagaaaaaaacaaaagattcacgtatttcaacctctacaaatctagcaaggctttccggattggaaataaagtcgatatccaaatccaaatccaaatccttcccgcatgacggatagcagtggatataaggccgcgatgcgtgaagttcgggctggactagactgggatatcttcataggtcagtgcaaagtacctctggtgtgccacaccggggcgaattaactttatttctgctgtttcagggaaatgaaacccactaggccgtaactgcagaggatgttacagcctgaggggcttagggcggcaagccggcgggatcggaataatcgtctggttttggtgatgattttgatcggaagcgccggagcgctttcaaggtttggagtgtgcggatcatgcttgactaggtggcaggacgtgggtgttatctttgtcgaggttacaaatcactacgatgtgtagggcaatgtagcagggcaagtctttcgctaactcgggtattcatattttcggcgttgataactatctcaattcattgagctgtttcagtcgtagaaagatagatacctctaatcccgtgaatacgtaaatagtaacgccgaatgcaaatggtggattggctcgcgtccaatctgagtgaacagaatataacccgaaacgcctggttgtatcgagatgcaaaaattaagccatggaaaagccatggaaaagccatggaaaaggcacaaaaaggttcaattcgtaagatcgtaatcgtctgtgtgttgagtgcacacaggaattccgggtttaggtccgtttggagtgtccctcacccgagttgggctctacttctgcctcaactggaggcggggcgccccgccgctcaggactaccatagcccatctagaatcaagtcagaggagatcatcagataccacggtttggtgacttaccttgtcaagtttgtagtcgaccatgagaagactcagtggaatgagggggagggtagcgatgacagccagcgtcaacagcctgttcatggtctcttggtacgcacggttgatagcaatgcgagttggagatcccattgggtacgacagagcggtggtcagcttgccgaagatttcagcagcttggcccttgctttcctcggggaggtagcggagaagcttgtttgggatagcagaggaccacacggctccggagatagcagcgccgactgcaccgcccatctccatggaagtcaggaacatcgcagtggctgctgcgacttcctggtggctggcggatgcttggacgcccagttggacgggcacgttaaccagaccgccaccgatgccgaccatgatttgtgtgccgaggacttggaagtgcgaggctccttctcctcgacacatgagcatgagggctaggccggtcatgtacacaacacatccgatggtaatgtagatgcggtatcgccgggtatacttgataagaagtgatacgctgaatgcggcaatggttgaagtgaaagagaaggtctgggtgacgcgcccggcagtggcaacgtcatatccttgtacaacctgcaggtaggaatagagataaggttgaacggagaagtagaaggccactaagtagggttagcagggacacctcgaaggtagagagaataatcaattcactaaagtaccagaacgccaatgcacaacccgcaagagcagttctctgcttgagcaggtgtagagagagcaagggcttcggggccagtttccgtgaagactcccagaacggtagcagacacaggcaaacaataccaagcgcgatcatggtcaaaatactggtgttctgccacccgttctttgcggaggccgcaagagttaaaggcaccagaattaatgtgacggcagcggacaaaagggccagtccgccaacgtccagatcataccaggtccgacgcacgacgctgacaaaatctgttcgttttctagtacgcttcttgatcaaattcaatctctgggccttgcgctgattgaagagcagggtgagggcgagtggcaggaaggatgcaggcaagataatagcccacattccataaccccatcgccatgaactactgcgcagcaccgcgcccgcaatagtcggtccgagccagaccgtaaccaagaatgggaattcgggcagtagggcgaggaaggcacggttcaacaggtcactgctgtcggcaatgaatacttgttggaggatctgcaagcccgttgagccggcggaataaaagatttgggcagaggcgtaggtttgaacgttggttgagccggccatttggatgtatcctaggacgtatataaggatgctcaaacagaaagcctcgaagcgaccgaatacgtcggcgatcttagccatcgggggtttgatgacagctatagattaaggattagcagccgcttattgaagcggggtagtagatctcaccattgaccacattttgaataacgaggacggtcgagatcaatgaatgtttactgaatgaactcgtcgcatatgcagacagcgacatcacagtctgaccttccagcgacgtgcagaatgccatgaggaatatactttgcgctaagtcagcaggggttcggcaagaaagcatgggactgcaagccacacgaacctgacgtaggccaccattaaagacttggtcgtccaagtcagattgatggcttcaatcttttggactccctcctgaacttcatccggtgtagacaatccactaggctggccctcgacctgatattcatcctgcaacagttgatcccgttcatcctccatcctggcgcttccgtgttcaatagtgccgtaggacggtcctgagcttgaatcgagaagcggcatgtcgcgcgttaccacaagatcgtatacgttggaagtattctctaatggacagggtccatataagaataaccggcaagagagttcggtctgggattggtagaaaccatatacgaaagacggcgaccttaaaagcgacgattaagcgagaaacagaccatcaaaaaaggagttcatgcgatatcaaacgtaagtagcgggtgtatcacataaaagggatggagccctgctctaataagtagtacttttgctcttcagctagatagcccgagccactcaggtccacagagaagaaaaagaaatgacaatacgggatgtcaacggcgaatcagagactgatttaggacaggacaagaagaaaataaatatggggcgtgatatgtaaaaagatgtcgaagcgcgcttgcctcggggggtcgacccatgaagggctattaatattggaagtaagtagcaaaatccggtaggcagctatggggcaaaagatttggcggatgggtagatccgccgtgcttcggagggcgacgccccaaatgtaaggggaacaggccttgaagagtttaggcttgccagtctgcgcaaaaccacaccaaccccgatcgtcggtcgcacttatgcacgctgatggggtctgtggtgtagtgaggtgagatgagaggctgaggtccgatctcagctcgctctctagcattccaggttgctgcaccaggacagtttaagaaacagtgtcacgttgcaatccagtcatcattctgggatctgaactgcccaggtagttcccatgtattctccgcaaaagagatggaaaatgtgtccaagagagaaaatgcaaaagaggtggagtttcaggcacggggagcggaggggcacccgctgaatacacttgttcactcggtggcatgagctgagtctttggtactgccaagtcacggtttccctggttcacgtcatcagataagatggaaccttgatctcttgatctctgttatttgtttccaaagagtctcttctcatttcgaggacacttcgctacatcataatacaatgtctccactatgtggcagcgacatgcattgctaccctgtcatttattacctccgatctagggaattgttagccggaatgacggggccggtcacttgacctggctatatcattttcccttctatgcacattattaatgcactccgtagttactccgtagtatttgatatactttaacagcggaaatgaaattgggaaaaggaatgcaataattggatggcatctttcatttaggtacttctctccacttgtgtcatatccacacgcgactggtgtgacctcggcatccgaaacagggcctgtgggcgcatacacccgattgtcgggattacactgcactgggtatagtaggatcagatagctcagtgggaaggtgtaggaatatgcgctctaatgggtagtatacacatataggatagaagaagaacagcaagaggacccgaagtctatatatccactataagtattcaggggtgcccaggagcgcaatagacatccgatatagtgccaagaacgctaaaaccatatgcaatctaactatcctcagtgttcaaattagcataacctctctattaatgcatctggtaaccgcaagtgcgtcagcatggctgatcatccaccatgacaaagaacgaaccatgaatcttggaagaaagcaacttgattgactggaactatccgtacatcggctgatcttcgccatgtcagtcatctttagcagatacacgaggtggacctggaactctgtggagccgtggtacatatgtccgcagcaagccggtatccttatttctacctgaatagatcattaatggcctgccgtgttccgttgcaacgtatgatcaaactggtcttactttacaacatacttcattccaatcttcctattcgtcatatatactgttgtctcttcgcagtggccatcgtcaccttattgaggcatataactaacaacgtcctgctgacctattcctggtctatgatcaaatgactgaacttgacagaaagctccccgccctcggttgatggccgggcagcatagataccaacccagaagtcctccacattctcctgttcaaagatccaagtgacctcccggataggagacttctgcaagccctcaacaagatagatccacagactgttgtcctcttccctgaccagttcaagggttgccgaaccactacctgaaggcactggaagcaaactccagtccgcccagttatctttggcgacgacgctgaggtggggtttgccgtgggtgagttcaatgccgcacttcacccacttctggccaccaccagcagtattgaggacgagcactacaccaccctggtcatatttcttctcccaaaggccagtgacggcgacgcggatccgcttgaatgacttcagcggcacggacttatacagaatcggggccgagaaggagatcgtggaaggtggcttggcccaaatatctgtggaagctggtgttttgatggtaaactccgcgggaaggacacctttgcctggcacttcggcatcagaattggcgaatttgaattgcgattgcgacatggtgggctgtggaatgcggggaagccgtggtatattcacagatgaagtatattcaatcaccacgccacggatacttggtcaagtgggtggtttaggtggaagattgggattttagtaagtgaataaagagaataactcagcggaaagataaatgatttcgcctaggcgccaacagaacaggcaagtccatgggtgcccggacgacagctacgtcactacataccgggacttcctactgcggttaaccaaatgatgaaatagacatagagctctcaatttacttgttttgttcaatgttttatttcccgatctagaacgtatttattgaagcccagaaacatttgggctcgttatattcacatcccaccgtacagagtaccgaggccaaggcaatacatgtaccgcctaatgtaatagctataccgcccggtgctttccaattattactggcagacaatctaattgccggcagaataataatcgcaagttgtctgacaccacgtgatggcattgatgatgtaagttctccatggaggcttgctttttatcatcaacaatagctgcaatgtgccagcttattgaatcaatttgcagctaaagataggcctaagggtgtatacccatttggtaccacgatccgccatgactgcacgactactgcatcccgatgaatgggagcttgcctcgcggtcctcagttgactcgcaggggacgttcaatctcgacgaggccgatttcgaagctcaagtcccttcttcatccaaatttggtaaacgaaaactgccctggctgtcccaaatcttctcctcggcatcggcgggttatcgccgcctgaacaacacttccaaaccgattctcgcaggcacaccacgaccgagctgttctcgacgtctctgtattcgccgctgttgctacctgcccgtcgtcgccggcatcgtttttgtcctcgcgctctttacctcgctactcttcccgtcatatacccatctacccgcgcattactctacccttcgcaaatcagtactcgagagctcataccccggacgaggcaatccccgcaaggagaaggtctttattgcagcaagtctgtatgatagtggcggcaagcttgctcagggccaatggggaacacaactcttggtgctgattgatctgctcggtcctgacaatgtgttcttgagtatctacgagaatgacagcggtgacgagggagagcgcgcattgcgcgcgttagaggagaaagtggagtgccagaaatccattgtgtctgaaaagcacctggacctgaatagtataccgactgtgaccattcctggtggatcaaagcgaatcaagcgcatcgaatatctggcccaggttcggaaccgagcattacagccattgaccgaccacccggagatgaagttcgataagctactctatctgaacgatatcctcttccagcccgccgaggttccccagctcttattctccacaaacgccaacgaggacggtgttgcccagtaccgtgcggcctgcgcggtagactttgacaaccctatcaaattctacgacacatacgccacccgcgatcttgaaggttacagcatgggtcttcccttctacccatggttcacttcatccggcaaaggcgagagccgaagcgatgtgctagccggaaaggacgcagtgcgagtgcgcagctgctggggcggaatggtggcatttgatgccaaatatttccaatccggctcgccacccacaacgcctaacccagctcgcttccgctccggacaggatctcttctgggaggcgtctgaatgctgccttatccacgcggacatccaagacccgcaaaccaacatcgacgagatcaccgatacgggaatttacatgaacccgttcgtgcggaccgcctatgactcccgcactctctcttggctaggagtcactcgccgcttcgaggggctgtactcgttcctccacaaccttggcaatcaccttgtcggtctgccttggtacaatccccgtcgtgcggaagtccccggccaaattgtgaaggagactgtgtgggtccctgatgctgcgcaggacggtaacggctctttccaggttattgatcgggttgcgggcaatgatggctattgtggtcgtcgcggcctgcaggttattattcaagaccgtaagcccgggcagaaaggatacgagagtattcctatcccatcgtagacctggacattttaatgttgtggaatcagatacccattctatctattcttgttatatagatttgcttcttttggtttttttggtgtattgctattttctagaaaagctttaggagcattagatcaatgcataatttgtgagctgataattatttttcctccttcgctcagcaaaaaatagagtcgttcaggcaagggaatactaactaagtaagcaagtaagcaagtaagcaagtaagcaagtaagtgagtaagcaagtaagtaagtaaacatataagcaagcaagtaagtaaaccgcggcgtagccactaagctgggtaggttcgaatgcctaaaggcttgtatagagtatagaacctaggctaccccctacggtaggtcacattaggacaggctttggttcgtctactcccagcaaactataacccgtatgcgtcaccaccccgagtggtcgcttacaggtagctggtatctcttgagtctagaccacttaaggcgtgctgcgcatataagagcgaaatgtttccattccccccccccatttcagatctaatggaaatgcacagtatgcctatgaagtaattactatactaacacactacaacaaaatactgaggacttcatcatggccatcatctcagaagcattgatctcagtctggtcacatctgccagccatcctcgtcacccttgttatatttcactttgggcgcaaatatctcaacccaggattaacgtccatccccgggccattactagcgaggataacgaacctctggaggttcatcgatgtcgccaatggccgttcagaagtgacgctccataaccttcaccaaaaacacggggactatgttcgactaggacccaacgtggtcagtgtgcggaatttggatgccctgaaaacaatatatggtattaataaaggatatcaaaaggtgtgttcaaattgcaataactgattgatcattctgctaatatccgcaagacaaacttctattctgttcagcagcagcttgtcaaaggaagaccaacgcctacactatttactacaactgatgaagtctttcatgctgctattaaaagacccgtctcgtcagcttactcaatgagtaccctgactgaattcgagccttttgtcgataagatcattcatactttatttgggagattggatgagttcgtagctgaagcaaaagtctgcgatattgctgcttggctacagtactgtaagtctcactcttctcgcgacatgagagcggaagctgatgcagctcaaaaagatgcatttgatgtcatcggagaattgacatttagtaaaccactcgggtttcttgagaaagggaatgatgtcgacggaatcatcgtcgcattggagcatacgcttgactatgtcggaaaggtaagtattgggtgttggataaatgacacgaaagctaattagagtgggcattagatcgggcagatgccatggcttgactaccttttcatcaagaaccctctcagaagcttcttgacggggggatcgaccggggctgtggctcgctttgctcgcgcaagactagacgaacgattgaagcagaaaagcacaccagtggccaagacacaccaagactttctcgatcattttctgaaagcgaaagacgagcatccgactattgtagatgacaaccaagtcctctcatatacgatcagcaatatgaatgctggctccgacacaacggcgatatctctccgagcaatactttattacaccctcaagaacccgccagtaagtataaagctgcaccaagagctcaccattgccttgaaagaaaaccggatctcggtacctgtctcatggaagcaaagccaagagcaactcccttacctcgatgccgtgattaaagaagcattacgtcttcacccggccgtgggattgatgcttgagcgagttgtgcccgccgaaggactccagcttcctgacggcggcccattcctaccggccgggacgatagttggtgcgaatccgtggatagtacatcgtcatcgggtctttggggaggatgtggagtcgtttgttccggaacggtggctcaaaatggataccgagtccgaggccaatttcctggacagaaagcagaagatgcttcgtgcgacgttcactttcggagctggaccgaggacctgcattggtaagaatatcagtctgctggagatttataagctgattccatcgctgtttctgagatacaaggtaagagtatggttccagaaacgagatttgactctaaccggggcttttgcagattgaattcaatgatcctagtgcagaatgggagattgttaatgcgtggtttgtgaggcagaagaatatggatgtgaggttgtcctgtaactgaggctatagtagtatcatgaagttggacagcggcgaccaggggaaggactcgaaagagcgactcactctctattttatctagatccaaatgttttgttttgcagagaatggctactgagactataatagctgaagctaccttgtcaggattggagagctgtcagtagaagaagactgaagaagaccgttctcggaaggtaccacaacgtgcctttgtcctatagttccggtatagtagctgacgaacaagacattgcctagcacacaatgagacaagttaatacaagcacaaggagtagcagaggaataaagaatgctgtttgcttacaggatatttctttgtctgacatctaaagaacagtgggatatctaatatgtgccctataggaatgactccgggccattctatcttgatgtctgtcttctaacccggtctttcctgaatgaaacaagtatagccagaatattaagaaagcatgaagcctttgaatgttccttcccgtcttgcatccaattgtgccttcctaattcgaacacagaacgcatctgttctacgcgggtactccaaataaaatgttccgttttgttcttcttcttcttcttcttcttttcctctccccatcctgctacttttttcgttccatcatggagacaaccaaagtcattgggcctagcggccttgctccaattactctgcagcgattggcagagattcgcatcaccactgaggtcatctacaagatgatcaccaacaacaacatgatcagtctggaggagagtgcccatgctcctattgatgtccgtaacaaggctcgtgctgatcgcctcgctggcgtgcacacggtctcagcttccctgaccactcgtcgttttacccagatgggcttcaaggagcctaagctgtatgatgcctcgaaggatattgagctggccatgcaggccaaaaaggtatgtctcactcttcccaatgcccccaatgcccccatttcccctcatccattcctatccccgcccactacatgttatggtcttcttcattaagtcgcttccattctctcttcgtgttttgtccccgcgacttgatccccatttcttatcaacactcatctctcatctctcttcgttactcccatctcacactggtctttcataggacgagaaagctgctacttcccctgatgccgctcaggagactgccactcctcgtgcccctgcttcgtgtgcccccgccaaggagacttctggcattgatccgcgtgctaagccatttgttcctgctgccaaccctgctggatccaaggacaaagctggtgaatgcagggatacagacaacgactccaccgctggctccaaagcatcccagaaggccgagtccgtcgcggatgagcctactgactcttccaagaaacccagaggtgttactgccccagctgacttcatgaagcaagtccgtttgctccacctgcagaagcagatggcacccaaggttgtgcctaccggacctcctcgtcggatcgttttcggagatcttcctgactgggccaacgtctccagcatccttcagctcgtctacggcggtgctatcgagcgctcttggagtgaggatggccacgtcgtcgtgcagtttgttgagcaagacgactgcattaaataccatgagaaccactctgatggaatcaagttgaaggatggtgatgacgacgtcactatctctgttaccatgcccgaggagggcctgaaggacaataacgagctttcgaagcgtgtcgaagatggtgcttcccgcatcgtttgcctctctggcctttcccccggcttccagactagcgacaacgagaacatcttgggtattgccgctgaccctgcctggggtgccaagagcttcgaacgcatcatgatcaagcaagctgaggtaagtttgcagtagttctatgttttgagtcttactaaattttctttctttcaagtctggcattgacatccaggtttccttctatgatctccatgacggttgggagttcttgcagaccatcaaggagggcgcgtatgactgcatcgccagctttgaaattgatccgtaggtttccggtttgcactttcactctttctttactaactggtctactagatgcgctctcgcccagggtttccacttcatggatgagcccaacctgatgttctctggcattctcgccgttgactagggtatggaatttatccatcagcaaccgcggccgcgttgatagccatcatggcttggatgaaagtggaggggatacaaaggaaatttcggaattgagatcttgcaatttgctttcgatgggttttcagttagtgattcttcctcttgctaggacataattaatgaaacaattaaattcgatcaacccttggaacatataccgtatatagtagctgctacagtaacaaccttaccgtacaacctagatcttacactcgcacaaccgtgacgaaagaagcataatggcacataatatttaagcctgctaattggccgctttaaattaaattagtcataaagtatatcggcatttgcagtgcccctcctgctcttttcatattagtgcggatgagattcgacagcgcggaagagggccagtggtcgaatggagtcgaatgtggagttttcaggatttagtgcgaattgtagcgccggggatgtcgaaccgatgtggatagctttgaggtctaatttttagtttttgaattgcgttacttagtattagtatacgaaggatagtacaatgtacattgtacgctttgccctaaatgccatatgcagtatgacctcgcctagttataggaccgtgacacaatactacacttcatattacctatatcgtacagtctcaacttgcaatagaatgaaatatccataattatacaactagctcgtattattggcccccaaagtacagagtccaaagcacatttaccaaatttcccctggaagcgaacacgggctaactatatcatcgtgcaacatcatgcatacatactatgatatcaagcctcggcaatgcttcttgattctttatcgccacaggcgacctaatttaccttttatgacgcatttacaaagtacatcttcaacacttgacatcacacatcaatgaccccttattacattaggtattctacattacatccgccccacagcccgaaataacaattcatgcccactagaaataaagtcctcgaatcgggaattatccttctgtcaaagagaaagcgacagaaaagaaaagaaacgaaaaaacccacgatggagtccgcgggtgaagtcccgaaccccggcacgctaggaattgacaggatcggccccgtttatatgtctttgtttttccgacgatctctaggggttagcgagagtagtcacgatcaaaacggaaacaatagtaagattaactacggagtaactaaaacaattaactaccatataccgaaaagagaagccgatcgaaaaccacggcaattggcccaagcccgagtccaagcccaagtcccatattatattgcacgcacggctaagtactttgtacatacagcataagtaccaggacaacaatgcgattctttaagcccctgacaagtccctgatcctggtatgggaggctctagaagtagaagtacatagttatacatatgtgcctagtaatgaactaactaatacaaaccggtactttggctttccccattcatccatcccgtataagccgaagcgaaggcgaacaaagaacaaaaagaaagccaccaaaaaaaaaacaaataaaagcccctgatcaagtaatggaaatgtcagaatcgcactagataactaattcccacatccgagatcttcatactagtacggagcacggcggatggcgacggcgacggcgacggcggacggatatggagcacctagacgaaagatggcactcgccttgccgtgaaggacagggacccgcgatcgacggatcggagggattggccgggttgtggataggtttcttttcttagccttagcatggtctggctgtgttgactagcgggttggatggagtatggcggactactacgagtcatgttctgggtcaatatccagaccaagaatagatgaagaggctagaatggtctgaatggtttggaattggataggttgcgagtatactatctactagcatatgtatgcagcgataacggcgagtcagtcattacactagaggttggactatgttggatatcaataggcgaggatggaccatggcgttgctcgggatttggaataggaaggatgaaagtaggggatttgcttgaggtgtttgataataatgcagaggataatacctgattcctggataaagcattgaaagtagaaaacattcagactcaattcaacctcgacttttatagtaatatctagatctaaatcccgatgttttgactctcacggcatggatagctccacacaacatatagatattatagccccaagaaccaagcttggaaagtgtaaagtgaaagtgtagacaagaaaaggacaggaacccagatggaagatatgtaaggagagaacatcaaaacgacaacagacctcccacgctgaacagaggtatcttaataaagacgaagaccgacccacgcaaaaacaagacagacaaattgacctcccaacgaaaccacccgaaaccaaaaaaaaaaaaaagaaaatcacttccgtcgcaacggcaacgcaccatccccctccttcctcatccaaggataccaaacattagtatactgcctaacgccatacttcggcgtagcaccatgcgccgccgaggccccctcacgcaagaactcgccgtcccgcatgcgccgctgctcccgcagcgtcggacacttcttctccttgataaagcggtagaacttgcactggatgccctggaagccgctgcgctggcgatcatggaactggcgattgaaggcagcgcggacctccttccactcctgcgacaggtcgacgcggtggtaccagatgaagtacatttcctcctcctcgtactttggccgcggcggccggcggcggtcgccgttggtcgaggaggcgctggagacgctggagtagcgctcgcgggagtggtaggggtttggcgaggggggctcggagagcgagctttgatttgtgctcgtgctggcgcggttggggtccgcgctggcgctggcgctggcggtcgaggaccggtaggtgaagaacatttggtgggaccgggaggggattacggtcgaggtgctggatagcgcgcctgggctggagttgtggtagctccggctgtagcggtagtctgggctggcgggcaggaagcttggtgagggctggtgagaatggtagctgtggcggtgggctgggattgaggcgtgctgggagcgtggagagatgtctccgtcgcctgggttcagcagggcgtcgattttcattttgctttggcgtgcggcgggcagtgttgcgtatgattctgcgtgtgccattttggaatatggaattgggccagtacgtagattttggacgggatttatagagaccaagctttgaatcctccccagaaatgctcagaccaggtctgatagtagaagtggggatatagaggtctatatcagagagccaatggacgattgggaagtacagaaagtaaggaagtatagtatgcgcttggggtaacgggcaaggtttatagatctctcgaaaaagaaaagaagatcagcccgccgtcttaaaggaaaaaaggacgcgaaaagatcgaaaaatagttctcgcagcgttgggtgcactggaccgactgcctgggtcttggttgtgttcctttggccccccctgtatagctgtgtaccgcggatacacaaggctcctggggctaacaggggtctgttatgaggtttggttccacccccagacattgaataatataataataatataggaatataggaatataggaaaataaaatacaaatacaatataataatatataatataataaatatatatatatatatataatataatataaaacattaatcggtgaaccggactgcgactccgttagtggagagaattattttattaattctatatcttttgaagatgtggcaattcggtctactccgattccttaacctttttcgaatccttctttctttgtagagaagtgatatgggttccaaggttggagcttctttaacgggacgatctttctaatttcttttttctgtattgtatatacagcatacatacatatgtgtatgcacatactccgtatgcgtaaaaaaaaggagggccacgcggtaaattcattttacctttagccttttgcaatcttagcgccaaggcgaggtgatgaatgacaaatcgtatatcaaaaagcagttgagaacatcgacgtaatgagaccgatatccaagtcagagagaatcattgctggtctttgggaccctgctgcatgagcgcttaggtgagaagctcgattgagcacctatcagataatgtagaaataaaaaaagaagtgaagaataggaatctcgtgaatttcaattcaatttctgctttagtgtcagtgtttcattctgtccaacacgactttgtccccgttgtaacttgctcatgtgagtgggtaacgggctacctgatactccgtgtcttttccccttccttattttttttttgaagtcagatgtagacacagtgcagaaatggaaaaggaaaaatgaaccaacacaaacgcgcggcgtctattggtagacgcaaagtctgttgctgcgacgtacgccatggccctgggatatcgggacgaatgagcgtgaggagctaatgcaggctcgatttggcactgccaacacatctgtctttcaaggcgcactatgaggtaagagagatccttgaagaccgtggcacagttctgctctatcctcttcaggctgacaatagtatgttgtacttgccaatacacgactactatatactacatatacttacctacaatctaactatactcttattctctcgggggagccgacaaagcggatttcctgcgcagtcaacttgcatgtatatcaaatccgtgacgatacatgtcttagcactgatcctgatgttactcgcgtgataataattttcctctgcgccattttccctcgatctgcgccttgaccaggccgatcgtcagtcatctgcagccgccaacggtttcctttgattttcttcacggtttaaccgttacgattctatttgaaacggaattaatataaaaatattaatctcaaggaatacagttgagtctattctcattctcatctcacctcatatcaatagaccgtatcatgtatatcactcttctaattagatccacgcaatctcctccaattaccagaaagaaaaaaaaagaaggaatagaaaagacgttctgatcgtatttctgcggcgcagtcaacttgcgcaagcgtgaaatccatcctcaattagggcaacccatcggccacctctgtatggcccgttgcttccgagaaccccccttcgcaagccccaagcctctcactggtaatcctagtccctgaagcccccaattccgtgcagatcggatcaacatggctccccccgggggctaaaaccagccttttgcccctccccactctgttttctttgtctgccgctctccactcgggacacttttggcgttcatcagtcgcgtagccgcaggcagattcggtcacgtgagggctagtgtaatatatgtttccctttcgtctgtacgtgtattgtatttgtatcttcattcgtatcttttccctataattgcttcgcttcgctccgcaatccgtccatgtagcatacactaaccattagatgcagataatacgcttgaccctcccaaagatcaactccttcctgaaccaacacgtcgtggccatccatggttggcgtaattaccgagtttaattatcgtcacatttgcgcgagtcatgccgtgcatattgcatgcccatcctgctccaacggttaacgtaaaaagaaaagaaaaagaaatgaaaatattggacgatattcgctcattaattttgaaattaatttcagaacgtgggcagattggtccaaaattcatgtatatcgatccaatcaccgtccccagtcgcttaacgtctgatttatttccttctttttccgtttcttttccgctttgtctgagccgcgtagatcggtgagatgtgtcgaaccctcccctttttttttgtacgtttttgtactttttctttgtttgcgcaatcctcagctcgaatcggcaggctcgaattccaaatttctcgttccccaggcctcttctgcagctcaaggtagacgtcagcagccaaggacgctatgtcctgttactagacgttagcgatagccgccgcctgccccgctgcagcacgcaattaattgagtcatatcggattttatagttatgttgcgacggaggatacctacggagtactcttaactccgatagatcgttacgggcattgtttgggggccgacctcgatctagaatctcattttaccagagtagatctggactcttcttccttcttcttcctattattcctgcctccgtattcgaaacgggctggtcccgtcgacagggggggtggaaatgactcgtttgaatgcgcaaatttccgaaaactgcatctcggatactacatggtagggatatcaggatccagcatgcccggcgaagatgcgcagtcactgcgcaacaacagtcgggaaacccacagtttcaagcgggcacagccgttgcctaacggagacgaaagaggggaatagattcgcttctcccccacaatgggccagacaaaaggttcgtctgtatccgtaaatccattatccatctgtcagtacctccgaatccgaactccggcaatcccccctgacggatgtcataaccggttggcctggattggctgtatacttccgagaagattccaaatagttcctagaaccttgagccttggagccttggcctttcgaaaccttctcccttccatagatcgagcttgaggctcgtttctagcgaacttgggatcggagtcgatcgtccgaacttacgccgaactgccagattgatataatactgtcttactagacgtgggcatttgcaatcgcagcatggtgcttgatttggcgtagtggagcatgcagttgtgttgtgaactggatatgttgacaacacgtcgataccaacttccaagtaaatcctgcattggcgccagaaacacctgaccgtagcctcctgcaagagaatcctggtcatcccaacgttggcagttgttggctattgggggcccgctaaaggcgcagaagccgggcgccagttgttgcaacatccgatcatgggtccgggtaatcatctcttggctgtgatccttcaaaatcaataatcatttgtcaggaataaatagaattattaatccagacttagcttccccgtaactcctctcgggcttccgcttcggatccgactcccctatttagctatggggcctattcaggcttttggtcgatttcagccgcacggtgccaagctaggatttctggcactagccacgacagagtatgtacggagctctgttgtacggagtacgtgtaatacaggtatccaatatagacgcaagtcgtacccatattgagaggctagactacggagacgttgattacggagacgttgatgtgcactattagtgtatggagttcaacacgtatatctccgctcccaagaccccacgccattcgcactaaactagtaaacgatccataaacgatccattaaacgggggccggccgaatcctgcacggttcgatccagcgcagctcacccgcaacgagagtggacgtgatcatcttccttgttttcggacgctctcgagtctcgacagactccgctgggcatattggaagtcgtgatgctatcatcctcacacttagcaccatttatatttcattcccccgtccattagtactattggcccaggtacgaatatcctcacgaatcaaaaacggggaaaatcacccgccaagcaagcttaatatctagtagcgactagtgcctccagcttcttttcccgtatctggcctagcgcgagggaaacataggtaccgagtacggagtgctgtctgtcacctttgtctgaaggagatccgagatctgacttttcggcaagacatgaagagggtctaggtgaagtcagtttgggccccccccccccccccccagcccccccnnnnnnnnnnnnnnnnnnnnnnnnnnnnnnnnnnnnnnnnnnnnnnnnnnnnnnnnnnnnnnnnnnnnnnnnnnnnnnnnnnnnnnnnnnnnnnnnnnnnnnnnnnnnnnnnnnnnnnnnnnnnnnnnnnnnnnnnnnnnnnnnnnnnnnnnnnnnnnnnnnnnnnnnnntggcccccccccccccccccggccagacacgcgcaaaaagagagaaaaaagggcaacgagacacggattttagtaatttccgttttgacctgagcagctcaaagaattccgaattctacaaatcgtttggacgccggattccgccacacttctggaatcgatcgacgcgcaaattcaaagaaatgataagcgaagcagcgaatggggatccccggccgaaaaggcaagaaggatacggagctagctggttatgggtggctcgctgtatttggtattttcattacgtttgttacgctcgctactgcttactgaggattatgtatccagtgcccagacgctaatacacatcggggcaatgatgttatattaccttggcaatatcaaccagcttgaactgaactctttatattgacattcagctgcgtggatccccaagtcatgatatcaacacttgagctggtaggaccgatatccacaagaaccctctattgaattctatactgtggacaggaatacgacatgatattgcctgatgtcttatccctcgaaatgctacaggattgggtatttacttcccttgtcgatcttcttcagtgccaggcgatgtgggtatacttcggtttcgcgtatggtttccccggtggttatcaagatagagtatataaatatatattgtgcccgaagtagggctatcatccggcgctattgtcatgttactatctaaagccaagcatcgcttattcctggtggagtgttgagaagtacgtataagcactagtcacacgtggttcgtgacgaactggcggaggctgtgcttattctcatgtcagatgatctatttcttttgttctccgtcttggctgttattgttctaatctgattgtataggggtttaggtttccagttggataatttatccgagatccatacacatatgtagtcatggttacacggcataccatataggtacgatatactcgtacgcagcagcatattatttccactacgactcttcaaacgatgtgtccgtgcagtactccgtactcgtacgagcacacacctgatatacatcatacagcccacctaaacacactaaccagcagatcttaattagataggcccacaagaccccggctaaacacacccgtctcggctcgcggtttgatagggcgtggatgcgagcttcccccgggtatatgcggagaacaaagttattgtatggatctggcctatcgtctcctttccggaagatcactcgtatacctgctccgtaacgcgcattgtaatggtcattgtggagacggactggatcctgccgaatatcagaatttcgaaatttcgaaatttccactatgggttccgatcagccctggcggccggatctgacatgggagatctgttacacggcggccgatcgaaggatatgcggtgggatgatgaggcgtcgtcggggatacgatgggaaagcatatgggctaggggaagtgggtttgcaatgcagggttaggaatgtggttggatgtgatgtgggttgggaagaaggggtggccgggatgtgcgtgcgtgtgtgtggaggttgtgtatgagatgtgatatggaggatccttcaaaaggaaatatataatactaaaaaagacagtgaaaaggacaagcccaacagtcacccagttggaattatcgccattcgtgaacagcaatagcatcaatggcatcaccgctccgacttgtgatcattagcgaccggtgatcagtccagcgttgccattgccattcatgttgtatacagcccgaagcagtcaacagtcactctgtaaatatcggtgaaaacaccgctcaataccgcacgtgcgtattacttcctgccccagccacaccaatcagccctcgggcattgacgacaatggaagcactaatgccatcagcacaccgaagccagagacccgggtcattagctccgggatcgggccttctggcgtgagctatttctgcactccgtttcggcgatagattgactttgcgccgttggatgttggaattagatctcgggacattaatgttgtcgcctcgggggtttgttgcctggatagtgctggatagtgagcgatgagtggttcagataggagtgggggcatgatttggtgtgtagcatctcttgagttgaggtcgtatttgcgtgatttcttttagcgacatcagacactgtctgcatcagggactatacctagttgagtaggtgattagtcgatagtgtttcttcatggatttctccgaaatctggatcagcaataaccccctcaagcttgaagtataatcaccaaagtacccgagtcccgagtatagcgtatccattctgctccatcctcgaatattattagcaaagtataatcgggcactatcgtatagtagacttggcatcttcagatgttcagtaagtcttcaccaccaagacagatgtgacgaattgtttccgacgttcccccgctgcaagagattcgagcccaatcaatagcggatactcgagactgcccgagcacaggaacctgacgaaatcgcacatcttgactcagtttggcaacagcctttgttcgatggttaatgctcctattggaccataacagaccggcttggataaagcggattctcgtcggtgactttggcctcatccattctccagtcggggcgttgcacggttgtttcgtgtttgagacgtgcagacggagtacagcgaggacatatcccaactccaaggggctgaaggattgggaatgatccgagctttgtattttactattttggtaattgcgttactgtaagattcattcgtaaattaccgctagccctttctttttcttcgtttctttcctttagagcctcacctcctcgcatcgactcccgcttattatatccgcccaacgagaattcagccattaaattactgcaaatgaaggccaaccatggaactagaccgagctatcctctagttgcatatccacacatcggggtagccgaactgaatgatatcaaggtgggttacggccacgtaggagttattcttcagtcgatcttttgggaaaatccaaacgtgaagattacagacatacggagtacatcgtgcacgggatctgcccggtttcatgctaaattctatcttgatcttcgcgactttgcatgtgttaggccgtgtgtccgggtagaaatggggctatttctgcaggatgtagtggggttggtagccttgtcttgcctattttgatcagtcgagatatctatccagccctgcgcctctaaaggctattatatatcagcgccgttggattgtgccattgcaatatatcagctggatcctatttgtcgagctgttgtacatgttggatagcgctgataccgacacctagagcgctaccctagtgaccgctataggatagatctcctgcatgcacaattcactatgtcgcatgcaggccgactgattcgtaccgtgtatgatctcggctttcggagtggactaaacaccggtgacggagtccatgagggagtaactaactatacggggaatgttgtatacggagtccggagtccaaataagggatcaccaaatcgtcatagaccaacgcgatgaaccactgtaaaatagattctccgtccaatagactaaatcgctgccaactatcaagtaccaagacagagatcgacacaccgacaggtatatttgaacacatgaccaacagcactagttagcgcagacagcaatagacatctctcatcgaatcaaccaacaccacaccaacaccaacaacacaacatacaccactgctatgttgtatatacccgccgtgctcaaatgacttcatcatatctaccccgcaatacatccccggctccctaaatctcatcacatccaaaagcaccgaaaacccacgtggcacgataactgactccttcctatctcgacataagacaagcgaaagccgcatcctcaacgacccccgacccttctggttggttccggggtagatcggagaatatgagcccacacacccttcatccttgactgcgtttttaaaaattttaacttccattgcctgatcggtttttttttcacggagatcctccgactacactttcttgtcttgtctggtctggtcttactagtcggttggcgccatttgagatatttttgtcccgttgtttttttcgcgggttggttggagaggggacgatcgggctcgggtgaaacgaaacgaaacgagacgagacaagacagaacggggccatcggcaggagggtatggaattggaattggaaaatggatatggacatcggtggggaaaagatggcttggattcaggttggatgtgggttttcggagctacggggttgccaacggcttggttggtatgtatgcgtccctacacggcctgggacgagatggatggaaaattggaaattggcaattgggatggtgcagtaaggagtgcacggagtagattgtagttttcgtctcgggtttcgatttccatgttggatcgttggtggggggaggggcttgcttttgatcctgattgtttacaacatacgccccaggaatgagggatatatctctttatcccatgagacgggagtgtatcgatatggatgattcatgcaccaggaggattctcgtgtagactccaggtaactctacgattgtctaatctaggtatcgtataccgagagtatcgatgcagccctcgttggcgtattcatacttcatataccttcctcttttagtccagtgtgcgtagcatgtggatatacctgggagtctcaatattagtcctggccgtctttttctcctgccgcgggatgcccaaggtatcttttatgtaattgatcaggtcttggctcttagcagctagctacgacaagtgaaaaagtagcacgaggcttgttgattcgatagaaatatgaagtaggtattcggagtaaaataaagcaaacgctcgatcaggacgtggaacaaaacaagatagagggacaacggcagtgtcgcatagcgggcagatcagtagtcttcatctgaatctacgtgctcgcggtaacgagacatgtacccagacccgccatcctcgctcgctgaatcgtcaaagtcgaaatcatcctcatcggacgacgcttcttcatcggggtaatcgttggctgggttgttttcggctgtagatggtcagtggaggtctatgaggggacgaaaacgaaagcggacaaagagaaggcaaagaagggagaaacatcacacaccattagagtccgcatcctcgctatcccactcctcctcgtcattctcaataaaatcctcccagatctcctcgtcctcggccgtgatgacaatgacacccactccaggctgagacttggcgagatccttttgctgctggtcggactcgaattcagcgagcggattcttcagcatctcctcttctgatagcggacggcgcacgtaaacgtcgtagacatagtcgtcctcgtcatcctcctccacagcctgttcagtctgcggcggtggtgtaaccgcgactctgggttccttgggctgccggggctggtgtttcaacggaggcttaggagccgtgctaaaagcaggctgtacatatgcaggcggaggggccggtttcacatcgatatccatgccataatcctgctcagcctcccgctcaagctccaacgcaatctgctcgaaatcatgagccagacgttcagactcttgctcccagctcctgtgctgtgtctgagcggatttctccaacgtctcagacagacgctgcttcgcagccgagacagcaccctgacgctcctcgcgccaccgtttctcagcctggttaacaacaggccgtttgcgcggtttaaccggcgacgggggcgtattatcctggacaagttccttaggctttagcgcgagagcctgcgcctccgccaccatatccgaaaccatagacgccttgcgcgagtgcgcattgcgctgcagctgctcaaccagaacagccacacccggcgcaggaccaccagtgcgccgcttctggattcccccaggcgaacttctcagcgagtcgagattcgagcgcgagatctggaaccggcgcagggcctgcgcgcgggtcgaggatgtctcttctgatgccgggctgctgtcacgcactgcgggttcattagtggtagtagctgcagagctgccgggctggatgtcggtgaaaggagaaggacccccgtagacggcacgcttgtgcttttcctccgcttctttgcggacggctgcgatgcgctgcgcttcgcggaattcggctcccggggacgtggcccgcactgtgggcacgcccgtcgaggatgcgggcgcgcgccggtttacatggagactgcttactgagcgcggggcgcgcaagagccgttgcgcggctggtgttgctgggcttgcgggttcatctgcactcccatctgcactcttcgcgctggctttcagagtgactctgtggaagacgaagtcggtgaagcgccgcttggtttggtggagtgcggattgaatgactgggtaggttagtgttggtggtcaatgtggcgggcgaggtttgatctagggaccgtttccgtgatattatgtatcttttggatgggtctacatcgcggggaaaaaacacgggaattgttcgtacatagggtttcgacgggctcttcctcgcgccgacgcttgatgttgatttgctcgggtggaagcgccatgatgtcaagttggcatgtattttgcgatgtggattgtggggagagaaggttgaagcattcagtttgatgtgtctgatctttaccgcatttggtctgaatgatcacatgatctgaatatagatgtcacgagtccggacaccagaactaagagggcggagtactgaattgttatatcagaatcaatcaagatcagcccctaatctggccaagatgatattagagccgttacaattaagatacaactactccatacaatgtctttaattagccgcaaactatagaactgcggtgacgatctacgactcttccaattgactggtgcattctgttctcatgtataattgcttcgcttcgctccgcaataatgtgcctgatctattatagatagatgatcatttacatttctaactaatgttccaagttgggtagatggccatttttctgctaataggaccaaagtcccaagtggtcactatgcaatgcgatataatcgccgccacgactcgtccctctccatggtcatcatccagtgaaacatgcgacgtactcacagccccaagcaaaataaagagatagaaaaagttcaaagatagaaagaaggaagagactcagggccaactagcaatacaaggtggtaagacaagatggtatgcaaaaggattaataggggaatatagaaatcgcgaacggaatatgtccggacgaagagtggaaatccaaaaagccaaagaaaagtaagaaagtaaagaaaagacaaggggtgaaagtgaaagtgaatagcgaagagtcagaaaggtaaaaagattatgaccaatacaagaaagaatcagatcaaatggggggaggaaagacatgacaatcagaagggactatatgtaagaagagagaataaagtggcattagggtcaccgaggacaagagtcgaaggttgcatcctcgagtgcgcatataattatttggctccgatctcctcttcagcccagccgggcagcgagttttcgttttgaatagccagaccaaatcctgagtggttcagtccaccgagggcagagaagctggagaagctgctctgaggctggtgggcacctgtgcgggggtggggttgaccagagacaggtccgaagggctcctgggagaatgagggcaggctgacagcccgtgagtgcgaagcacggggcacgctcagactgctggtgcttgcgtggtggccgtgtcccgatccatttgccacactcaggtagctgttggaggacttgtgctggtgcatagactggtccatgtgtccattcatgtcgccgttgctgacgctgttatacattgactgctgtgattgtgcctgcgcctgtagaccagagagggccatatggtcgtggagatggttctcctgctcctgggcctgatgagcagacatctggttcaggtacatcgtcaacgggttgcttgagccgatattcaggaccccagaaggagaggtcacgttctgcagcgggtggcgatgctgtccgttatgcgacccagttgatcccgatgccggggaaagggcagggcgagtcggacttgactgggagccagactggctgaggttctgctggaatccgttgagaacggacggtggtgactggccttccatgcctccgttgcggttctgtccattttggttgtttccggcttgacgcggtgggtttccgcagcggtcctttccaaagttgatcttgaaccgccggtagtcctcccgattacgcattccctcaatagccttgatggcattggcgatattcgtgaagttgacaaaggcacaactcttctcgcgcagcgtgttcaccaactcgatctcaccatactccgagaagtcctggcgaaggcgttcctccgaccaggcctcgtccaagttaccaacatagacattgcgtgacgcaccgccgctgactgctaacgcaatggcgggcgggagagggccggagtgtttgccccatccaatcttcaggcgccggttgtggatcattagtccctgcaggttgctcagggcgtaaaaggaggcggccgaagtgggatcgatgaatgtaacgaagcaaatgtgcttatctgggatataccgaacatggtgtagcaagcctccgcgaacgacattgcagatctcttcgatcgttgtttcggggtgaatgtttccgaggtaaatggtgcggttgccgagattgttaacaccgcctgctgtcgtcgccacggcggccgcggcaacagactgttgtgcaagggcattagaaatcagatcacgatccgccgtgttcagcacatgtgcatacccgggtgcgatgccgaggaactgggcagcattttgctgctgagtcttggatacatacgcacaacggtccttgccgtagaacacccgctttggcgcttgccattgcggctcctgggggagctgggtgacagacttcatggcattactgatcgataggaaatggacgaatccaatcgccttctccttgacgatcttgacggtgtcaatgggcccaaatttgcccagatcctcccgcagatcctcctcggatgtttcctcgggcaaatttccaagataaacattacgcgacgcgcccgactgttgaacagccagggcaactgaggtgggaacctgcgacggcttaccccagccgaccttgatatcatttcccttgatggccaacttcttcaagatggcatcggaatggaaatgagtggctgagctgctatccaaaaaggagatgaaagcgcagtttttatcagggagcaggcgcaccgactcaatctgaccgctacgcacgtggtttaaaatctcctcggcagatgtttcagccgggatgtttccaagatacacggtgcgactggtccccgacagcatgcccggggccacggacgcttgggggctgccgagacccccattgcccatcccaagaccattaatcggcgattgcggccccatcatctgggagatacccataccgtcaggtgacatcatgccatacaaaccatggttctgcattccttgcgtagggctgtggatatggttctggttgttttgggagtgtccattgccattggcttgtgagaagccaccgaaattggtaaactgcggcgaagcaaaagccgagggcgttcctggttggaagggactgcctaccagcagctgggaagggagcaggggggtgtagttcatatcgaagccggaagccatatcggagtgttggccggcggcagtgtttatagcggggatattggcgcgacgcgtattccggtccgagaatccttggatatgattggggtggttgttgttgtacgctccgtgagaaaagccagtgtcaccgttcagcgcgtatttagacccaggatgaattagacgcgaattgttcgggatgctcgatacatccgaggcttgcatggcgagagaaatccaacacttgtcctaagacaagaacctagtcttaatcagggggatgagaggccctgactaccagactgagctctgatggggggggggagaaagggaaaaaaaataaagggaggattatcagatcaccattcaggagatgggtccccacagctaagatcacagggaaaaatagggaggattcgggtggagaagaagggaataatatcaaaaaaaaaagaagaagatctttttttcaaatggagacgtgtctaaatagaagttcacaagtcaattggaatgtttttattcactcagggttgaaattggggattggggaatggggaagacaaacctgtcctttctttgtatgtagagaatgccagttatatgtatatcccccacgcagaagagaaagagaaggagaatgcaaatgcaaaactacaaagtcattagcttaaagaggttaagaaaagggaaaatggcctgaagaaaaaaaaaagggggtcagactgggggaatcggggaagagtttacagttgacaggcgactagttccttttagaaaaaaatataaaataatccttaaagccgaaaagaagcgagcagcgagaaacggaaataaaagggttaaaagagcgtcgagaaaaggaatgaaaggtaaggacgtgaatccaggcaaggtatgggagaaaacattaaaagggggagaataggagtgggttaaggggggcggactaacttcaggaagttctgatttatatgcagttaccctcaattggattgtattgatatcgaatagtacaatataaaaagaatcgaatcgaatataaactaataaaaacaaacttggtttccccaaccttgttcccgtggctctgcagaactggatcaggtcccaatacccctgacaggatcaatatagaatataactaaattatatacatctgcaatactcagggacatcttttaaatcctcttcttaatttctgctggacaatagcatgagtcctgtgacaccgtgacaccctttatatctatccacgactgcaatatcccgtgcgaagaacatatcggggccttgatgcctcatttagaccgcttttagatatatttgcaccccatggatatgaagctttggcgctatacaaattgattatctctattagtctaggtgggttattctaaatcctacgattggttcatttaaatctactcaattgttttcgtacatgacagagagtgcaaatcacctagaaaaatagaatgtatgaatctgtatggtgccaaaagcctcattttgcctcatgctgacagattactaagctgtcatttttctgccgggccgaattcaggcatcaaggcctctatccctagcttatagatgccgaagaaactccgggccaatctatactattcacatatttagcccagcaaaggtgcattttcctattctgaagcgaaacagccatctagaccttttatgttgagtttgatcggcactcaataaaccctcgtagagttggccttacaattagtctctgaatatcaaccaattacgttggagagtacatagctttttcttagaacccctaactatcgttgcaactcttgtagccttgtattctccagtggtgtagtctcttttcctgtcaattcttggacctgttaaggagacgttcctcacgttgagctaatatcaggcaaagagttcccatattctgtgcgttgctgatatcttgatgatctgaaattgaagtagatagttacttaaagcaatgtcgtcattatacttcatgactcacggcattatcctcaataatcagattgaacatctaacatctaatacctatacttcataccaatagttagttgtacacccgaaagacagagatatagatcgccgcctcaggcatcagtggggatcccgcatctatcggaaatttacccctccgcaatgtgcgattcctcccttggacaacttgcaattgggaagagataagagttccattctttgcgttatcaggtgcgtttgctttcacattctaatccgtcctgcatctcgggattctttcagcccggggtatgactcacagattagacctatattaattatctctcccacagaactctcccgcaactgcaaagaccagacccaacgccatggcgtcaaccagcatctacatcgacgaagacgtcggtaaagacgagtcctccgccaccggcaccgagaccgccccctacaagaccctcgtccacgcctacgtggaacacccccccaccaccgaaggcatccagtacctcacgcgcaagtccctgaccgacgccgccggtgaggatgtcgaccccgcagccaaattggagtggaagcccgctaccaagtcggccatgaagaaggccaacaacctctgggagcagcgcaagaagaaggccgccaaggaacacgaattggccatccgcgagaaggccgaggccgacaagcgccagaaggtccttgaggacgccaagaaggtcgtgatcaaggaggacacctcgctgcccaagcccgtacgcattcgtctggacgtcaccgacccggccatcgtcaagctgcgcaccgccgagtccgatgagcccggcacccgagtccgcgttctgggccgagttcaccgtgcccgcgcccagaaggatgtcgttttcatcactctcaccgacggctatggatacctgcagtgcgtcctgaccggtgacctggtcaagacctacgacatcatgaccctcaccctcgaaacctccatgtccatccacggtgagatgcgcgccgtgccccccaagcagcatgcgcccaacgaccgcgagctgcacgccgacttcttcgagatcatcggcaaggccgctggcgacaaggaggccattaccacgcgtgtggcgccggacgctgacccgcagactctctacgacaaccgccacttggtgctgcgcggtgagacctcttcctccgtgatgaaggtgcgcgccgctaccctgcgtgccttccgcaaggctttcgaggagaaccgcatgctggaagtgacccctcccgccatggtgcagacccaggtcgagggcggcagcactttgttcggattcgactactacggcgagaacgcctacctgacccaatcctcgcagctgtacctggagacctgtctcccctccctgggagatgtatactgtgtgtgcccgtctttccgtgccgagaagtcgttgacccgccgccacctgtcggagtacacgcacctcgaagccgagttggacttcatcaccttcactgatctgcttgaccacctcgaggatgtgatctgccgcgtgattgattacacccttgctgagcccgagatcgccgggtatatcaagcagctcaacccggacttcaaggtcccgtcccgtccgttccgccgcatgaagtacgacgatgctatccagtggctgatcgagcacgaaatccccaacgaggagggccagccccacaagttcggtgacgatattgctgaggctgcggagcgtcgcatgaccgatatcatcaaccagcccatcttcctgacccacttccccgccgatatcaaggccttctacatgaagaaggatcccgaggaccgccgtgtcaccgagagtgtcgacgtgctcatgcccggtgtcggcgagattgtcggaggcagtatgagaatggacaactgggatgagctgatggccgcctacaagcacgagggcatggacccctccccttactactggtacactgaccagcgcaagtaagtgatgtgtcacatttttcctatttatctcaatgctaacattacaataggtatggtacctcccctcacggtggctacggactcggtctcgagcgtttcttggcctggctgtgcgctcgttataccgtccgtgactgctcactgtatccccggtacaccggccgttgcactccttagatatgtcaaaaaagttataaagcatgatcatgataggtacaggaatgtggcatgggtgctacaatggacgaataagattttccttcaaatgaattaaaacgattcagtgtcttatgttaagtacccaggtacaaagtacctatgtagattttgcttgtcccttgaagaacacggatacgaacctaggcctgccatatcccgcaagactcttcaaactgatgcccactgacactccacaccacagcttcgaacaacaccaagtcccggaccttggatactctctgaacacatgtacagtcaagtccacccagcagtcttcgacattaggatcccgcagaatatagtccacacccagggatccaaatccattcccaaaatgttgccgttgccgttaccatccagcccaagaccctggcacctggaattcaaaacccgaccaagacgggaggggagcatgcatgcgcacatagcctcaaaccgagtcccgtctgcatagaagtttagctagattccaaacacggctgttcacgtgcggcgtctctccatcgcccctggccggtagatttgatttcatgttggtgttggttttagtgttggtattggttggatttagctcccagccacaacaactaaagccatagatggaaccgatcgtccggtctgatgatgtgcgagtcagggttgcgatcagtagggaacgggtatgttacggcattgccgtgatcgaggatggggatatggatgttgtcattttcgtatagaaaaagattggaatcgagatcgcgttggatgaagtctggtcacgggcacgggggatcgattcggtgtggtgtcgtcctgctgttgtcgtttcgggtggcgggaaacctctgtctgtcaccttctttcatcatctcccacaacgggcatgggttagttacgggctttttttttcagaaaaatgggcagagatctgagattcgtgtgaaggagtaagagggagtgagagagaaagtgagatggtctcagtctctctccgtctacaggaaccagagacggacagtgcgatgatgaatctgaagtcgatctctgaccagcctcttttcaaaaaaaaaaaaaagaccagcaaactctgagctacatctctagcataggaaagagaagaggagctgtcccgcctacaggaaaagaagcgcccagcaacaaagggcgtgatccactacatcctgtgcttccattgctcgaaaccgcacggagatagaatccgtaatgcccacggggcattcccattccacttgacccccttcgagaaacggcccaagcagcccagtggatattccatttaggtatgtccttgtgagcagaggaatagaactgtgtttgtcggtatttcggaccgaatagacgccaacatcgacggtcaccccgttttcactcttttcaacacaactcatcaccacccaagagacggacgctgcttaacctcgagttccccggacagggacatatcctcgtcgcgtttaagtcttgatgtttgccttgtccccgttgtacctttgtttcattccgggtgatgtttccccgtgtacggagtggcggtgggcctgtattgggtttccgcacaccttgggttagtggctggctgtcagtctcataccgggcttggtattgatagcctgatcgtcggaggtatatagatgttgtccgtgtcgacgagatcacagctgttgtgatcagcagggaactgggtacaagtacgtacttttcttttcccttttcttgctcttggagtcagagaacacgtcgtcgttcctcgtttttccttttcccttccaataaccctaattcatgcataccccggacaatacttgtgacaaaacacaacacagacattcagctctgtatgaaaagccaccccatagaggaacatggatgtgaaaaaaaaaaaaaaaaaaaaaaaaaaaagcgtcatgagttatattgactaccactcgacttacagcatttcatttgtcttatgtcttttccaagacctaggcaaaaagaggaagaagaaggacactctcatgaatcatgattgttctcctagaagacatcaacagtaatgcacgattatgtcacccaattctcgagccgctccaagaaaccaaaaaaagacaaacaatcgccaaagccacaaaccacagcacatgttcgttctcattggtcgagtaaagtgcggcggtcaaatctcatcttggacgcgttgaagggcgaggcggatgtcctccttcgacgccccggagcgaataagcgagacaagccgagcgacagcatcgctatgagcgtcgcgcacgacagcgaccaagtcttccaggaactttcggtagtagttcagctcgatttcctgctgggagatctgctggcagcgccgaggtgagtcgatggcatgttcgctgttcaggctggtggggaggtcacgagatctcagcttttggatcaatttaagcgttgccggaagggggtttggttaacggggcggaagaagaaggaggagatgcgttcagagaagacagtgagagagagagagaggtaagagataatagaggaatggtttctttcttgcaatttgggccggacgagaaacgatgactactcactttgctgcgttctcgctgcgtgccgactcggtctggcgggctccgttgcgagctcctgggcctccttggtcgttggtagagacggctgcggtgcggtttgacatgttgatgttggactgggggccgggtatgtactgtcagggggtgatgttcctatgtgcgaagagaggtttgggaatggtctctaccgtgctcgaagctgatcaaataagggttcctggtgtccctgtgtctacctatagaatagcacaacttcttagtagttagcaaccagactactggcattttgggggagcgaaaacagatcctaatgggagaatggggcaaatggtctaagaggcgaagtatgaacatcaaggtaagaggggctgggggcacaaatcggtcggccatacgtgtttatagacaagtatcaccgcgtgggaagaagataaccttttacatagaatttgtagaaaggttgggagatgagattcgacgagtctcgagaggtcaaagggagaaaggtgggacctctaacagaaggtatttgaggggattgggcagatcgctggtggcatccaacgaatcgagaaatatagggcctggtatacttccgtgaggctctcgaggtagcctcgtgttaacattcgggatcgaatttgacaatatagcaatttcagaataatagaagaatcaaaagaattgcattgtagcagttcgattgtcaagaccttcaatcggccccggataaaactgccagccaatcgtcaagcgtgtttttctccagagagcacatcccaagtatcaatatttgggccagcctaagtccatcttccgctattattttccaccaggctcttcggcttcgaccttggttcctggtgtgtggtttgccgggaaaatgaggcgaatttagggccctagattaatattcgcctgtgtattcggatttgccgaaatctccctcgggacggatagattcttgattccaaagaggcgaatgtattcatttttgtatccgtggcgactttcgcgcttttgtccatggcagtttgtttatggagagtggtggagtgacaggcatctgtactcctgttccactgtttcagtagtgacaggagccaattgggacggctaggactcccgggtggactcgaactaacggcaagtaaactgacagcaagtgtccttggtaaagttgatgatcgccatctcatgctcgttcaaactcgtgggcctttcattctacctcgaggatagagctgtgaatactgatggacaatctgagaaacgtgtttcgtcaagttggaccagaatgatgttctgacatccctgggacccggcttctgtgtcctttcacagacacacattgaagaggtacagttctctctgtcttgtctggatgggattcaccggcagattcgtagaactgcatgctgacttgccctttctttcgtttaggaccgacccttttagcacccaatccgtttctcaacgtcaagacaagcttcgaactccctgttccgtctcctccttgtccgttgacaatcgaaccctccatatgaacatgccgtgtgttcgaccgcacctgataaagttgagcacggtcttttctcgccagacatattccacgattctgaaaatttctctcgataccacgaccccgaacgcttgaaacttggcaacatgccttaaatggcatgtgagcctgtataggcatcggttgctggctgtttacggcagaacaatggtttaatgacctgctgtacggttgtgggggttatggacgtggttgaatgggaggaccgttcaccaacactccacgatattattcagtgtggaaacatctgggtattggatcgagtaccacaactcgggggtgtgacacggaaccagcatttgatgaagagtctggtgttgggtataatagaccaaccagcccctggctcccatgtgcttctgtgggagtgtgtagcattataccaacattttctgttattgaccacacgaacagtcatcgatgccgcagaatagcgtgtcttgaaaccgaccatctcaactgtttccgccatcacctccagggtattcgcgggatatttccggtccatatggttgatagaggctttcatgcaacggcaacggggatatgaacgaaagtaagtgattggtagtgcagtacggagcagtggcaccgtcactgctccgttctgggggttgtcgtgggtcgtttttgcacatcaaggatgcagtgtatgtggttccatgtcgattcgggtcaaggaacatgatatgatgccttttgatcttgcaagctatgacaattccgtgtctgaaggccactttcgggtcgggtgtcaacttgaacccaggctctcagcatagacactcatggtcgcggagtacagagcgcagtgatcatctgagccaggcatggtaaaggggtatcgatcggtgattcgaggccgtttcatccaggccatgtcgaaggttgctttggtgctgtcgggctttcgacgggtcgtgatgggcatcgacgttggctttgtgtgtgacgaaaacggggggtcgtgtttcccaggcacactgagactaggcaacgctcatccgctgcagtcctggagcatccgatctgtccgagtcagtcactacacagcacggtcggtaacgttggaagctggcccatttggccagctcgatgcatggtcgaggcagtctcttcctgtgatcgtgtccccgttaatatgaggctttctgtcggtgacggtatggtgatgtatatggcagagtagacatgatatgtgagtgagaagcaggtgtgacacttcggagccgagttgggctcgatccttcgacctaaccctgaaagtagacccctgtcaccagtgatgccggaacatcttctagggacaaccccgtctcgagggtagaacctgagactccctacttgtcttttctcctggcaggacacacgcagtatcaaaaggagagtccgaggtctgcagtttcctttcccaaggggaggaaagaccaactctatccttcacttgtccaattggatccacccatgatgaggaaaatagttccaggcgaggttattggggggctccaccggcgccaacattgaaacaagcgtcagacttgcgttttataatgtacagtgatctagtgaagtcgaggaactcggaattcggaccctgctccaccaatatgcgaatatgttagcatttgttgaaagttctcgtggatgttaagcctcaagagaatgtcctatgatctgtgatcgggcaaatcttggttggcccacatctcactattgaccaccaatgcagtggctggaacctcaacagtagaataacgagcaatgttcttgatattgcccttggtataggaaccgttgctgtgaagttccaaagggtcgcagtcaatccttgataggatgcatgtggcaaatgttcttagttcagccacccgtgacaagtagaaacctgctaagtagagttggtaacttgtttctttgcaggtacagggattcttattcataaggtcatccacggctcgaccaaggggaggttcattttccagggccgattagcagatatccatttacaaaaaatcgaggaaaccattctaactcgcatcttaaggtacatcgatgttgaacgagtcagtggctcataatagcaggatacttggaagccttacgtaaatcctgacgtgaatatgacacaggcagatgacctggagattcgacattgattttaccttccaagctttgttatgccatggacgtctataaccttgatcaaggcacaccgaaacgatatcctctttatcaatctacttctacgaattcggtataataagccaagctcatacctctcgggtcagacgggtaccagtcgactatagctatataaacccaatgaattcgaaaatcccatctcgtgtcatacggagttatgtacatgccaatgtatacaaataccacattccacagcccccgaaaatgcccctaacacgacacctaaccacaaccctccattcctaatgtacgcgttaaatactaataaccagcctgatccctcgttgatgataagcctccgacaaaacatctcgacaacgacaaccgacaactaacgacaacagccgacgaccaaccgacgaccagcatctatacaaatcaaaacagacaagaagaaaacaaacagcaaagaaaaccaattcaatccaaacatgcatcttcccatcctcctcctcctcagcgcctctctcgcttcagcgcaattcggcaaccaattcatcccaagcccagcgggattgaaataccccaaacccatcaacagacacccacactacgtccagaacacaaacaaagaaatcgacaactacgacaactacgactacgacgactacgactatgataacatcccaagcctccccaccccaaccccaaccccatccccatccccaacccctcgaatccacagcacattcctagtgcgaccttcgcaaacacccactgtccaagccccagcccacggatatggacatgtctacaaccacccaagccagggtccagacgccgagtcccgagacaatgcaccctccttccgcggtgccgacgacaacgacgactacaacgtctcgcccggcacatcgggcggcgtggctccaattgacccgctagcacctggttcccaggtcgcgcctgctccgctcttcgtcaccgcgaatcatgggaaggatgaggggaatgcgttctgttctgggcggtgctttgaggatgaggaggatgcgcagtgtgcgaagccttatgtgagttttttcttttttttttaactcttttctttctgggtatacgatggagatggatatatattgtgtgtgtatttgggtattggtttactaatgtttgttctaggctttggctatctataagccggctaaggggtgctatatgtgttgtattacttccgatttctaggattggattggatattggattcattttgtgagatggggttgtttggtgtttttataggagacggatgggatgggtgttggctgtttcgattgttgagtgttcttggtctatatctgtatcttccgccttgcttaaaatagtttatttcttttttatgtcttgttttagattgaagtaagagtagccgagacaaaagtatcagtatcgtcggtggagagacttgccctaatttcggcagacccatcagcctgaaacaaatctgtacattacacatctatacgatacaacagatcagcactagatcgttggtaggtccacaaataaataagcttgattaaagaaccagactaacattgcttaacttacgaatttacgaatcggtagagatgaatgaagatatgccaaacggtccatttggtctagataccagagatatccgcattaataaatctatattcgtgtagggagtatggaataaataaagagcaaatccatgatatcatatcgttttccacgctgaagagtcacagctcgctcggactcggaatttgaataaaaggataaagaggataggcatggggaaaataaaccgaaagagaacaaaagaaaaaggagcaatgagctccatttcatgaccgcaaacagtgtatgtatttttgttcaattcttcacgcaagtctcgacgggccggccgccaataccccgcgccatgcagataggagcagagcgtttctcatacgagatatctccccacacagcactgctggcagggaggatagagccactgtccgagaggattggaccgacgtcctcgtgcgcagagacgatgtgcgggacaaccagctcgacgcccttggtcacgctcgtaccggaaaagtacgggttgtggcgcgggggcagcgggcgggcctcgtacatgctgcccatgtagtcagaggcagtgctgctgtaggacgacgccacggtagacggggtgtttgtcaggctgggcacgtgactgtggctgtgggccagagcgggaaggctggagctgctgcgttggacggagggccgaagcatgggctcgttgccgccgtggaactgggagagatagttccaggcctcggaggatgccagggacgaggcgctccgctctaatacgggcttccattcggtggggtcaagatctgacttggcatcatgcacgtggctgtgtatccgcatggctgggattcggttgcttggcaccctggtaggggtcattggggccacgatagtgcgtggagagagggaaggagatgtaggtggtgtagtggtggaagacattgatgacatggatgggactgatgctgagagtggtttgcaagagtctttgcggcggcaactatgaaataaataagtattcgagtgccaagatatgatgcaggtcccaaacaaacaaaggggaaggcataggatggctctaaatataggccgagggttaccacatacctttcgctacaatataacaaactgttgttgggggtagtaatttggttttcacacatggcgctggaattgggtcagcttttatgtgcacgaaagaccggtgtaaggaacacagatgacggcaacaggcatgtgaggaaataatcccggcaggattcaaagataagagcttaggggtcacataccaaaagttcaagaagctagccatatcgaattcagtgtcgtccgcagacgtggacttgctcgctcccttttgtcctgagcccaatttggaaaatgtgacggtggcacctgaggtccctcgtcgatgtaaagcaggacgagtagacttggacttggaaacatgaggagaggaaggggagcggcggtggaagggggctgattgagtcatagcggtgtaggctcaaatgcctcactatcttatcgaaaagactctattgccgagactggagcaagtgtggagcacaagggcccctggggggagcacagactgagggatttgtgtgcgaagtcttgaatccaactggaatgtgccgagacgggtgcaattgggaatacaaatggggatttgggaaaatggagaaacaccggagtatgtatattgagaaacgtggggttgacgagaatcccaggctgataaggtcgtgttagccatctgacacacttgcgatgcaaccgccgactatctttagccagtgagtgggggggggagataaggccgagataagaaacataccaaataccaaggatgtctataacggaggtctattgttgtatagttgcaataccagagagaaaggggaatgggtgacacaggaatcgaaaagaggaaacgaaagaatataaataccaagtggaggaacatctgaagagaaaacagacgaagcggaaaaacgtgctgttctggtaggatgagacgatcacgtctagactcttgggacgagaaacccttggggtgatgtatcgggtaagtcacttccgacagcctccgccggtatctgcgcgctaaacagtacttgcatggtacttctcgggtactccccgggtccttgcccgtgcttgcccccctcccgacacgcaatcaatctagaccagctgagtcactggtgacgagccctgccctgacgccagctataattagttagctggccctgatcttattcttaatggaagggtcttgctctgtttctctggatctaagtgtcgtcgttctgaaccacctattcgcttcgttaggtacggacagattgtcagttcgacctcgcgatgtcgacttccaagtatatgcaatgcagtggcgcagggaccatatctccggagggggtcggatctggcgtgatcggtagattgacaccattcttcacaatcggtatattagtattgtatctactccgtacaagttgatacttgcatactggcatgcattgtataccatggcgtataccgtggaagagccacattctaaatgacgccataaatgcctcgacgagttcaaggttcatataaacagacccagatggcgtgaacaggtgggtgtgaaatacatcatcattcacatagtcaactacaatatacagcttgttataggtttcttacaaaatacttcagataatactccgtacagaataacggccggctacggcgacaacgaaaagagatcgacggatcgaaatcgaaaatcactatgggggtagtatgtatgaaagtgccacacacactaacacatctgcctatgacatgcgtcgctagccctcgtcagagaggggggtagtggtgggactaccattctaggccacactcacctgagcaagtcgtagtgctaatcgtcgatcttccgtcttgcgtgtttcgggtctatggggaaaaccggggctttctttcgagaaaaatgccccgatgactgccccatttagctttttgtttgtgatcgtttttcctcttttcccgtttgctttccgccgggtaccgatttcgttccttggataggcgatatcgggatataaatatcacagggcaagctgggattgatttttatcggtggggccggtgacatctgtcaacaatgaatacatcataactgcaaagcctgcttgagtcttagacaaagccgatttatgcgacgtggagaagaggtgatgctgacgtccactttgggttcggcgctggattctatctgggtatctaactaaatatcgtacaaataatcgctcatgctttgtcaatctccatcggctccgttggaggggctgctcgggatgccgctggcgtgggtgtcgaaggagcctcggtgagtgcattccctggtgtctcggcctggccctcatcggtcagtttcactgtacctggtcccggcttgcctgtaaaccgctcgggtactccacgggctgcctcggccggcccgacaaagcatcccagcatcgaactccaaatatacccctccgatagcatacggcggatttggctatatgcatatgaattggcgtaagggagagcggtctctggatcgcggtaacgcgaaggcaatgaagtgatgacgcatagagatgacgagatttctattatgtagggttagccttattcctaaaatttcaaaatgatacatacttgtcaaacggccgagctttttggcgttgaagtacatgctgtatttgcgattgttggcggtcgcatagtcaaagttctccaagatcgtaagacagcgtcccgtctgctcaatcactggagggggttctggaatctctggtgctggttccttcaccaatccatttgataattgtgattcggacggtaatgtggatggttggtttaggctccggactatggcgttttcgggcaccgtggcttgactggtggctgcaggagccggcaaggcttgaggggccagtgagacttcagagctaacagccgtggccgattcaactggccgagacccatccaatggcggtggttctggcacagtcgtcccagctgcatgtgctataggctctgcagaagtcggttgggcagcaacgtgcggagtggccaagcttgtttggtccgttgattctagaactttttgatttttcgtagaatctgcagccgctgcagccactgttgaatcaatatccatagcatcctcggttttggtgggtacatcaggcgatttttgaatagagccattatccgcagaaatcgatgtatgatgagacgctggaatttccacagcaaacctcaatctcccataattcttggactccgaggattgcccttcagctgtgatggattgatcttgctcaggaggtactgatgtatttgcgtcaacacttggagctttttccatagcattgtccttgccctgctcggtggaagtttccatgattgtcttcgtctctgggattccatctggttggccagcattcgccccggacactaagggggtgtttgtgttctctgcagtgtctgtattctctgcggtcggggcagcattctcgggtggcttgtttccagtcggttggtccacggtgaacgtcgaaggaggtagagattctggtggcccaacaactacatggaagtatggtggttgtgatgtgcctgtggttgaccccagtgccttcaactctgccgcagccttctctttatcttccttctctttctttttcttcctcagttcatctttatctaccttcggtctgatgtcgattttgcccacccgggtgagacgcccgttcgtccatgtagccacaccactccagtaggaaatcaccggaccgtcaagacgacgattttgtagtgcttcaatcctcgctcgtctttcgtccgcttttcgtttttccgaaagctcccagcggttgagacttttgctattgagccgctctactcttgctgcctccgcaagatggtcttcctgggtcatctgcttcggtttcaaatgggccttccgcttctctgcctccttcattgtagcgatgatgcggactcgtttttcctggctgtccttcagacgagcatgcgtaagctccttgttgaccatggtctgtcgacgtgatgattgccgagtaggcccatcctccacagtgggaatccacgagatgcgctccgactttttcttcggacgaggggcggcggacatggtggacggagcggtcggatcaatcttgactcgtttgcgcaaggtctggaatcggagatcattctgggctctgcgcttcttgcgttcgtctttttgtagtttctgttcgccctcgtagtcgttctgcgcgttcggcccttggtcttcatcctcgtccgacgattcaagcaactcgtcctctgcatcagggtcggccacatccgcaaactcattatcgtcttcgacttcctcaaatagaagcgacaagtcatcatcggcagcggcttcaaggagggccgacatgtgcagtcctgcggtgcttcgtttcgcgcgtcctctgaccaatgactccacgggcatctcctctccctccgaagactggaccgcagacgatgggtcttcttcctttatgtcggccatggtgttactggtggcaggtgccttagaacggacgattaagcatcagacgcgagaggggacgcgcgcgcgacagactatgctttgcgtgtcaatgatcagcataaattagaaaaaaatcaaagcatatagaatttggattctgccacacaattaaatgagctgttggagtgatgggaagataccgctgcgggctggcaaggagagtggcgcgaaagaaaagtcgatgcctcaggcgtgtagaaatcatccgaccaatggtctttactaacgtgtttacatgactttgaagcaacgacacaagatttctctgattgttatttggtcctacctccattgcacagtgactgatactactcaacttttatctagaagtgatgatctaccttttatgtactacgatgagccaccctgttcaaccgtaccgaatgcttctgaaagcttggcaaacaccttgaagatccggagagcattcttcaaggctcgacagatagccaaagcctagtctatttacgtctccaacacagccaccacgacccatgaccaaccccagagggccccagctgacgcctctggcaaggaagaaggacggggacacgtacctgatccatatcccttgcaaccaaaacacagcctttggtttcaaaccccagtcagttctccttacatgactagttgcatctcatcccccagggatatcttcgtattcgccatgaagtctcatatgtatcctgtcacggattcaagcgtcgagacatgacgcaccggaaggcggggcctttttcgtttccactcctgtctgccttttcttgcttatgccatgagcccttttcttccgaaagaaaaccttgaattggacatttggagggcatggggttgtaagggccttgtatctgtactaaacgtatacctttttagatttgttgatatctcaccatgttcagccagaatggagtcttctaaattaatgtcatgggccgtgccattgccagacgcttggaggaattgccgattccttatatttttgttcccgtttggttatttcgacgttgaatgtacagacgtgcaggaagtaagtactttatagatgcctgtctagtactaatgcaccttggatgtaccaatactagatagaaaatcaaaccgcctagagtgtcatagactaaatcaatccaattccattccattcaatcagatttcgtattttcaaccaaattcatccgaatcaacaatcgaattgtgggtgaagctgaaggagggccctccaccaaccacagccatcttcctcgggcatccggccagctccccaacatctcttctccttcctttcctctccccttctcatcctccctttgacttcttcctcacttctctttttttcttcttttgctttctgcattcttagggtgaattcgactttcggttagtgttgatgacactttcggagcgcaacactaactcactttccagccacctcgatccctttggacccggatcatcctttccatctttatttctcacttgacgcactttgtgccagaccatctttgtgaacttcgccgtgtttttgagcctttgacgacagaaaaggacttttctcttttttcttagctcgactcgattgctttgggacacccgcagattgtcatacaacccgaacaaacggtgagattatcatcaaagaccctcgacactgcaccgtggtgcttggatttggaaagcatcagtctcggtacgcaaacatcccaacgattcatctcggctttttggaattgcttttcgacccctcccactttgcgaccccccaatagcaacacacatttcgaacaccatctaatttcgactgtttccagtgtgccctcgatccttcaatctatccttatcccatgactcctatcccacactattgaacgaagctacatttaagttccgaccttgctatattttggcattcgcgcggaggtcatatttggaagggattcgggccctgccttgctgaaggtataaagtgataatccataatttgccggtttcgcggcctgacggtcagatgaatttcaattacatcccaaccacccaacccatgtcgggtacctcgacggggcgcagctctcctagcgatgtggccgggtctgggaactcaagaatgtccttcgggccttcttcggggtccattggaagtttgaggcccggggctggctccccttctcatgatttggcatcacgtctgtactcgaagcggtaggtttgcttctttacttcctgtgggatataacagacaccgcgacaattggctgatactttgactgttcaagcagagcccgtgaaattcaagctcaagaaggcctttctcctagtatttggggaccccctaccagcggccattcaaccccgcttcgcgagaatattcccgaatcgccgagtcaagatagttttccagatttgattcctaccagcaatggcgccatggacagccctggtcgccgagctcgcgctggaacggttccatctcgttttcctccgatgggcacactgaatgagatggattttcagcagtcttatatgccacagacttcacgaccaacaccctcaactagtccgtttagacctcccggtgtttccgggatagatacgagttctatcgcgagttcgactggtgtggccaatccggcatcgctatctcgccttcgagctggctcgatgccgcaaaaaagcaacttcttgggaggtggcggtcccttcggtccatcactgttttcaaccaactggtcgacgggtcgggagagagctacaactttaactagtattcgatcttcggaagggccgacttcgcctagccactcatctttctcgagggatggactcgcggacaccgatgtgaagactttggattatctgggactcgctgagaccccgcaacacggaatggcctcctatggacgtccgtctatggaagctttgatgcaacagcagcagcagcaagcttctgcgctgccgccactcttggctgagttggcgatgatgaagagcaataatcgattccgatcatactctgtcaatgccaaggagaagtacgccgatgacgaggatcttgaatacgagaaccgctactcccaacttccctcgggtactatgacgccgaccgccgccgcgaccgccgcgcaacttgccgccacacaggcccagatccaccagcataatctcgcggtccaagcttttgccagccatgcctctgtcagccgaccccgggcgcgaactgctggcattttggaggcacctccccagcgatcatccatccgcaattaccttgctacaccttcccgcctcgacagcagtttcagtgctgctgatctgcagattcccgagaatggtgaatacgacgaattatccgaggcagttcagctgatgcatctcagcggtaacggtattcccgctatgggtggccgaccggccggcgagatggcagatgagaacaaccaggatgggcctacgcgggcactttggattggtagcattcccgtgtccaccactgtcacgtctctggaggccatctttggtatgtatggaaagatcgagtctacccgtgttctcactcacaagaactgcgggtttgtcaacttcgatcgccttgacagcgccgtgcaagccaaatcgctgctcaatggaaaggaaattttcccaggcgcaggccccgtcagaattggttacgccaaggtccctggtgcatcggccaccggtactcctggtgcaaacggcacccagtcatctcccactcctgacccgaacttcagatcaaatgttgcagcgacagatgggccggatcgcgcggatactaatgttatccctcagattcccgctctggctgatctgttgcctgagatggtgcaaattgtgcaagaattcggcgccagtgatgatgacctgaagaacatcacggcaagcatccagacctccatcgcgttcaaggctttcaaggatgaaatcccctcggtccaggaaacgagtcagtcccggatgttcgacgcccctcgtctccgtgacatccggaagcgcattgacaatggtgcatgctcgatccaagaaattgaggagactgccgaggccatgctccctgaggttgcagagttagcgtccgattatttgggcaacaccgtggttcagaaactgtttgagttctgctctgaatctaccaaggagcagatgctgtctcacattgcaccacatctctccgaaattggtgttcacaagaatggaacctgggctgcgcagaagatcatcgatgtcgcgaagactcctggacagatgcagttaattgttgatgctctccgcccttatactgttcctcttttcttggatcagtatggaaactatgtcttgcaatgctgcctgcgatttgccagtcccttcaatagctttattttcgagtccatgctcagccgaatgtgggaaatcgcccagggacgtttcggcgcccgagcgatgcgggcttgtctcgaaagccaccatgccaccaaggatcagcagcggatgcttgcatctgctatcgctctccacagtgtgcagttggctactaatgccaatggagctcttttgctcacttggttccttgacacgtgcacattccctcgccgccgaacagtattggccccgagacttgtgcctcaccttgttcacctctgcacccacaaggttgcctacctgacggttctcaaggtgatcaaccagcgcaacgagccggatgctcgagacattgttctgaaggcactcttcttcagtcccggcgatgaagttttggagaagattctgagcgaccagacatctggtgcgactctgatcttcaaggtcttgaccaccccattctttgacgagtctatgcggactgaggtcgtgaaaaacgtttccaaggtcctcacaaagctcaaggcttccccaagccaaggctataagcgtctgatggatgaagtgggcctgtcctcacgaggtagcggtcgggagcatcaccatggacgtgagcactccaccccggagaaatcgcaacaccgtcaatcctctcgtcatggaaacacaggttatccagcccagccatccattgaccgacaacagtacaatgggcagtttactcccaacacgtttggccagaacccggacaaccgccctatctccgccgatcaatccaaccccccgccccttgatccatattccaacgggctcggaaaccacatgaacggtcttgccagtataggtggatacagccaggaacccctgagccagcaacagctgcaataccaagccttcctcgccgcacaggctcgcggtgttcccacgggctatcctgccatgccgggcgccaactacggctacccagctggttcgaccatcgataacctgcgatctctacagtcgcaacaggcttctcccctccccggaccgggccagatgagtccgatgctccagaacaactaccaacagttcagccctgttgtcaatcctgcccagatgtatcaataccctccgcaatactacccccaggcacagcctgtgcagggacagtcgggcggaggccgacgtggacgggtgagttcattctcggatcggccctaaaccgtataatccgccgatactaacgtgcatgcttgcgtccagcgttgatcccatcttcgtatgatttctaatcgatctaccttaccatctacatgtataaattttcttgatcatcttttcttctttttttctcatttttgaagtttctcatggagaccaagcgggtttatccagctacgtgttgtgatttcaccgtcctatctcttcaccctgatcggacgctggatcgccggcaggggagaacggacccgggagacgaactggatacgcatggggaatcggtggtgaaaaagtcttgtgtctcttctgggtggaggcccagttttgtatcttcggcgtttttgaatgaccttgtatcttttgatcttacgataggacttctcttctgcctgttgtcttagatcgagatttggctgcctagtggagcatagtgaattgatgcagatgtaaaaaacactatctcgtagtgaatgtaaataaatcggattgaatgagtcaactttgtcaacatcctttgaattcatgaggctgagctccacaactacccggtgcactgcaatccacagcttattttcaccatcgccaaccaaccatggcaagagaatgaccagtatgagcaatactatacaagaggagactgcaattctcttccaggataaaaatatatacctcatcgatatcccgcattcaatcgcgctcgcacaagaggggaggccaacatcacaacaaccaacctcagaatcattaagaacagaaaagagcacgcataagaatatactgaatctactttcatgctcacctatcaaagagccattcccctctaccgagcccaaaaagccagctgcgctcgctaatctcctcaacaccattcccatctctgagagacggttccactcggaactgatactgccactcgtgagggattccctcgaaactatcaaggctgggtgttcccatgatcgccggtggtgtgaggcacgagctgtgcctagtgaatctccaaattatgatagcagaatgccgaatcagaagcggcggcggggaaatgattatatatgcttagagtctgcggatgacggtgtttcgactcaaaatgagccaccaataattctgtcgactacctcaccgaacgacttcgaggctttatcagatcttgctattgtcaagaatccatcaccagagcccgcaatcatcagggttggaagctgccatcgcgacgaagcggattcccctccgtgcgaatatatggcaccacctaaatcgagctttgtgctttgtacactacctctattccaaactgagatctaccgcccatctacatccaataactatcccatccccgggctcccgcaccaccaaaagttcaatctcatcctcatggacccgccgtggccaaacaaatccgtgcgacgcagcggacactaccaaacacaccactattccgagatggatgtgcttaccaaaggattacgagatattctccgtgtgcactcgcacgaccccagcacaaagcaggggctacgccaagaaacccataccgaaccgatccaaagcgaacagtctatagctgctatatggatcacgaatgcggaaaaggcccggcgagcagcatacgaggccctgaccggcgcgggcttttgcatctgcgaggaatggatctgggtcaagactacgtgggacggacagccgatctcagcactggacgggctctggcgaaaaccgtatgagattcttgtcattggccgcaagggtgaccatagtatcaatgtcaatgtcaacgctaacgccaacaatgctacatctctgtctcaaatggatgacctgacgcggatgagtgcgaccattaccacgagacgagtcatcgctgcggttccggacttgcattctcgtaaaccgaacctgaagtcgatttttgagaatgtgtttttcacggatgctggtcggtgccaggagtattctgccctcgaggtgtttgcgcgcaacttgacggctggttggtgggctgctggtaatgaggtcctccggtttaatgctcgtgagtgctgggtcgagcttggcagatagagaatacagtcatgcatgaatgtgcatatgcaaatcaggttttcaggtcagccaggttcatttcgtagatttacgacttccagacttccaatgctgtcaacaagtgggtacaattgactcaacgcttattggagggtcattaaacttggctcaggttgtatatgtgtgatgcatacatgtacatagaggcggtctgatcctagggctaccatcgtggacatgcttattctcacgggaactgatttcctcccgatcagcgcggcaggagttccgcgctgacaaagtacaatataaaaaaaacccctgtagaattacacaccaagggactcaattacaataataaaatagtaccaggacttctctcacactacatatcttcccagaaacgcgggaaacacactctctcgcttagactgacctgtgtgacccccaaacctgccgaccaaattcagcttcatcgaattgacagaatttaccagacacaaatcttctgtctatgatttcttagaaatggctaaggatcacgaaaatggttcaggggtcaagaagagctcggatcgtccaaaatgcttcaccagcacatttcaagaggttctcttcgtcctaactgccacaatggccattggccagcagtccttcttccagggctgtatcgtgggcgtgacagcatctattggcaaggatttgcacatgaattccgctgaaatcacttggatcaacgccggtgcctcgtacgttttccccacatttttctacgggatttccccgggtttctgaatccgatctctttccgaccccatatacggagtccatacatcacaaaacaaaacatgcaaacacataactaaccatgcactcaaataccacagcctcaccagcggcgccttcctactcaccttcgggaagctagccgacatgttcggacgcaagatgctcttcaccatcggcatgggcggtttcaccatctcgctactcatcgcgggattcgctacaaatgccatctacatggatgtcttctcggggattttaggtctattcgcagctgctgtcgttccacccgcggtcggtgccttaggcgctacttacgagaagccctcgaagcggaagaaccttgcctttgcctgcttcagcgcgggcaacccgctcgggtttgttggcggcatgatcatctccggtgttgcggcgcatttggctaactggcgcgcttcgttctgggcactcgcggttgtttatgctatctttaccgttctgactgtatggacggtgccggctgatgggtttgcgaggacgcctttgagtgtcaaggctttgaagcagtttgatattctcgggatggcgttggttgttgttgggtttgcgttcttttcgagttcgctttcgtatgtttttcccccgtggattggataccttcttgaacttcccgctgactgttatagtctggctgcagatgcacccgatggctggaaaactggatacgtccttgctctgtttattgtgggctttttccttctcctggcgttcctgtattggcagtccgttgctccacaccctctgatgcctctttgggtctggcgagatcgtaatttctctcttgtatgtgttcgactttctcatgtgcagatcgaaactaactgttcagctcattggaacttgctgtcttggcttcatgggcttctctgccaccagcttctacctcgctctatatcttcaaaacgtgaaacatctttctgccctagagatcaccgtccagctactcccaatggttgtcagcggcgtgctggtcaatgttgtctgcggtctgcttctgcatcgcgtaagcaacaaagtacttaccggcatcggagcgctggcgtatacagcttcgttccttatcctgagtttcatgaaacaagatgctacctactgggcgtttatcttcccagggctagtgcttgtcgttgttggtgctgacattcagttcaacgtcacaaatgtacgttcagccccgcatgtcctttctacttcttgattccttgtctttcagcagtatgttccgtctttgaggtattgacttcattcagatgtatgtgatgtccacccttccaccatccgagcaatccatcgccggcggcatcttcaacaccgtcaacaagttgtgtagcaacctgggtcttggcattgctacctccgtgcagagctcagtcgcccttcgcatgactgcctcctcgcctgctattcggccttatctctcggtttattggtttgcggctgcggcttcgggggtgtctttggttttggttccgttcttgacaattggtaaacagggcaatgatgtttcgcaaaatgaccagttgatcctcgaggaggccggtgagaagacagatgtcactgctaagactatttctgtgatttcttctgctgttgatatcgcggagcatgagaagaggtaggtaactagtttactgggaaaattagcccagaaaagggtcggcattgtgattgagagcaaatgcgtgggatacctgaatacaccagatatatctgggattgtagcatatctcagtatatcccaacttttctttcagcaattccagacatatcattaaatgtacctaataacatactgtcttcaaggcacagcccgagaaagacatagtatctatccgaataccagatccagaaacacgaaagcaaactcttcaccgacccatgctctaatcaaacaaaggtcccaaactaaccaaactaaacctcaaatccggattcccaccctgcgcctccattttcaaaaacctcctgacccctaactccaacgcagcctcactaagcgcatcctccccctccttcaagacccccctagctaacggccccttcctcctcccgtctaattcccaaagcgtcccgtctagccccctaacaaaggcaacgaaatgcagatctacattatcctccgccaacggcgcagcggtatcccccagtttcgccgcatccgcatgagcactctccaacgccttactctcatacagcagatctgcgcgctccaccggccccaacgcttccgcctcccggagcagggtatccaagtccgagccagcaacgacatgtttcctcgcctcgccatttgcgaccacgtgcagcaggccgatcagcccgcatgcgttgcggatcgtctgcttgaaccacattaccggctcagcggggccggagccggtgtaggtgtctttgggggcatcttcggcttcacgtgaagcttcgtaggttgcggagacggggaagaccaggaggagggcctgggagggccgtgggacaaaggctaggagttccggctcgtcgatcgagaaaacgtctgtgaagcctaatgtgggggctagtcccagttggtgcactaggtgggacatcacttccggattgttttctgggattggggttagttttggcccttggatttggaggttttggggttggggttggggtcgaacctagtggcacaaaggccttttgagtgggggggacatcgacgtgtgccattgtgtttgattttttggtggtgtgtagataggtaagtgtgtatgtagtatgtctttgggttaaggtgagggttagaaggattgcggggttcgggcgtttccacgttttcctgcatgttcgatgttaattacggagaagacttataattggttttattggctttaatcggctctagttgggctctaattgagtgaaagttcgttagaaacagtattagtctcttataaagtttagacagacaaattgacaagagaatataaaaataaatctgactctccatcgggctggagtttccaaatcaggagcatcccagagcctgaagaaacaggctgcaatgtatgtttgcctggtttgcagcttacgtgtggcgcgtttaagagttagctaggtaacactcaatattaatagttagccaccgatccttaatagatcctcaatagatcctaataacagatccaaccggctaagttgatttgggtaattctccactgacctgtcaaacagaaagcattcagatcgcccatttctcgacagccttaaaaggagggagttaatcaccgaggaggcaccgaacttatccccccgtcccaaagtggatgactaaaagtggacggctctgacaaaggcacgcactaagtgggcggctgcatactccgtgctcgccggacccagaaagccctttgttattcaagacatttagtacggagtacacgccgttagtgtcgggttgatgatcatgatcgccactttgcctgctcaaaactatcggaccttccgaatacatctagtgtcccaccagtaacgatgggattggtatctgatttcccgtcggacccattccaatttcggaggctcgcaggaaaatggaaacggggcctggttaaacaaggctatggacataagattaccagatgctccatagcgtcgacccaacgacatggtagcttttgttcacccctgccgataacttcccgagcactaggaatagtgaaacatcggtgggacttctcatggagaaaaattgggtttttgcgagtccatgtttctcctatacgccatgcttggaagtcccaagatcatgatatttcacacccgtatattcgcgtgacctgacaggggtggtgcaatctagcggctcttcactcagtttatacgcgtggagaaagccacgactgttgtcgatcaccacgaggtgggcttagtgctgtttttccgtggagaccaaaaaagcatctttgacaagctaagggctagaagggctaaaacgttctagttctgctttactcgcccctgtattttgtggcttctcgtggcccgtgacataggagggtgttcttttattaagaatccttctccaccactttgaaatccttccggtatgacaggcattcaagatgacagacgaacagcagagaaaaatggcatgccagaccgtggcagcggtctttctgcccattgccactataacggtggcgctgcgcatatatgtgcgtggctggatcgtaaaggcgtttggatgggatgatggggttatggttggcgcaatggtatgttcaatattcttcaattcgagatctttcccaaaactgttctgtggggttgtatcagagtcagagatctaacaagctctaccccagttattctacgctatgttttgcgggactatgattggaggcacaatatacggcacaggttatatgcttgaccacctcactgtccacaaccgtgtcctagcaaaaaagtactggtggctctgcgagattgcctactgcttcgcctcggttggatgcaagatctccgtctgcatcttcctcatgcgcatcactatcaaacccctccacatctggatcctctataccgtcatgctcttgaccgtcctagcaggcctggttttcatgttgctcatgctcctccagtgtaggccgctgtcatacttctggtttcaagtggcacgcgacgctagtatccacggcaaatgcatggatatgaaggtcattgtcatcatgacctacgtttacagtgcatttgccgccctgtgtgatttcaccgtcggcttgttgcctatcttcctcgtccacaatcttcaaatgaagcgccagaccaagatcgccgtcatggccatcttaagcatggcttgcatgtatgtttcaactcgggtctccgtactagttctggatcactgacaagagattccatagtgcttcatcggcggttatcgtccgtatgcccttcgtcaacggattctacgaccccgatttcctctgtatgttccgactctcccgaaaacaaggccaacgcacgaacaaaactaaccaaatctttcactctagacgcaacataccaaatcgccatttggtccaatgtcgaagccggcctcggaattacagccggcagtctcgcaaccctccgacccctcctccgcatgtggacgggctcccactcagatccatattacaataacaactccgggttcccctccgcgttccccggcggacgctcacggtctgcctcgcgccaattgggtggatgtgataaccgtccgtttcctttgggctcgctggatgacagcggtcatcgcttgagaccggataagcttgctgtcactgttacgactatccacagtcagagggatcctaatgatctttactccacgagcccgactagcagcgaggagaggctgacttcggatcggtcatcgcctcgggatattgggttggggattcaccgcacgttcgaggttacgcagacttcaacggagaggattgattctgaaaggatagctgtgagggaacatgtataagtgacccacgtataacatgactcaaaataatatatactaatatcttgttatcgaattggtccgttcgggttgtataaagtcattctattgactcgtgaagaatgagttccatcattcattacaacttttggtcatgcctcaagcagctctcttatattcacgaggttgcttcccctgcttcaacggctcaaaaatatccgtccacagctcattggcctcgcccaggaagtatgtcaaatcaacatcggccagactagcatccccatccccagacaaagtctcaagctgcgagatcaagttctccagcccaaacgccttgcccgttgcctgcgttgcaccagcttcgagcataacattgacaacatgaatatggaaatggtagtaagtcggttgatctaaaattcaaagtcagcaaaaaaaccaccaacgtaacgaaatgcaactcacaatgaacgtaaagcttaatctgatcctcctccaaaccaggatacatagaaaccgtagcctccagcaccctccccctcaaatatttcaaccaaggcacaaaactcttcttcagatccctcaaactccaaatatccctcctctgcaccaaagccaacaaatgcaatgacccgatactcttccgatcccagttcaaatccggtaacatcagaaacccatcatcaggcccgagcccctcatcccgcagaaccacatcctcctgctcagtcctgccctcaagaatattaaacacccagttcagccgcccctcctcgcgcttcgcctgcatgaacggtcgcacgtgcgcacggtatatctccgccgtctccgtgaccatgcgcagatgctggtccgagtacttcttgatgtgctgtgcggtgcatggccagatgaggttgagtttgaggtcttgctgggggttcgcggcttccgcgggagtggtcggggccgtgttgttggcgtttgatgacgcgagataccagcggtagatgtcgttgtcgcctaggttgttgactcgcgagattgcggcgtggaaggcttgtagcacggcgagggattccgtttcgaatgccgcgcgctcggctattaggatgccttgcgtgttgtcgattgtgcctaggagggcgattcgtcggccattttggtctgggtttcttttagttcattgaggctgcggggtaggaggtggatgggtcggaccttgtttgaggagcttgctcacttgaaatttggtgattagtgcctctggggcgagcttgccggtgcctgcagagtcggccatgttaagctttcaatgtgggtatggctatgtagttaagttcaagatgttgacgatttactcagctttatcgggtggggcggtcaggcttatcttagatcttcaagctatcagatggaatatatgttgcaatgcctcgatatcagtatataatgctgcaaagttgctttgatgtcagtttcaagcaaaagtaaatgtatatcacaaaattatgctaccagatgcactgatctacagcctgaaatctatagaaatcccccattgactccactctaacccaacaagccctcaggcagtagcagactcctttccagtcttccctgatgttagggttgtatgcatctaagacaatcagaaaagaaccagggcaaaagaataacccgaatagatcataatagatgggaataaaacataccgcgtccgcaaactgcagccactcctccactcccttgacaaaagtgtcatctgccgcaggaatagcctcatgtccccatactacaaactcatcaaaggtcctctgaatctccataatcttcactggttcctcgggttcagcctctgcatcctcagcgccgtcattgtctgccggttgagctgcaggtaacacacggtctgtgtgtgttgcgactacacctatatattttcaatggtataatcagccaattatgattcaattaccgtttttgtatatccggaaccctcatttggatgttctctcataccttgatagccatcaggaagggcgacgcgccgacctcgaagtttgcgtccgcggaaatatgtcgtttgtgtattatctggatatgaagaaatgttagttctggtttgtacattagtctagctggattttctccatctagggctgtctgtcttgcatgcctttttcgtcttgcactgtccaataccgatccagtgaatcaactggcccatcgtggtgaatccggcatggaatgatatttggcacacattgcagagccgagtcattcttctcggattgtgagctcgcttttgcgcaaggctggatggcgtacatgtcgggcattgtcttggttgctcttcgtagaggacgattctgagtgacgaggcagtaacggtataaaccaggatattttctgggcctaattgttttccaatctgttcctatgttgatcaagtctggataagagaggtattgcctgggttccgcggtctgggtggttgcgctaattcttgcaaaagattggacgtgaggcgcgacgcgttctccccgttctccgcgttaagtggaaattcgaggatcgactgcaaatttatctatttatccctacgtatattgtagaagttttaatgcgtttaaattcgtactcgtacaagtaaaaaatacagctaattctcgtggaaatgcaaaacaattcaattggcaatgatcggggtatacatgtacagagtgtctaagcatgtctcgaaagctatatcgaatatttaactacatcaacgcttgcgtgtggtcttcttcttcttcttctttttctggccctcacccttctccctgttgtcggcaatcatccgagcaggccatttcttcaagtgctcccgctcaaacgcatccttctcccggcgatacaaagccatcgtagcccgagcatcttccacactagaatgcgctccgtcctggatcttgattcccaagaactcctcagccaaaatcttcaaacgtggtgatccaccacctgcgatcctccgatatggcgggtgcttgctcgtgtctcggatgtcgcgcttaggatggctgagaaggagaacgtccaaatcattgctgacagcatggccgacgagaatgcggtccttcaagatatctgcgatttctttctgaacgtgctcaagggcccttgcctccaccatgtgcttcggggcaatcccgctcacatgtgtgcgccaatctgtgaccatctccttcggccgcacgtacgaatcgtatatttggtcgccgttgaagttcacgacactgacgcgggcaagtgcagagtcgctgtcgggatttggtccgacgcccaccatttcgcaatccatcgcgacgtatttccctagttcggcactgcagctggatagttagtattgatatcgaaggacgggccaaatagtatggctgtccgtctgtgccctggcacttaccttggtgaacggccttcattctccttgtgacgcgaactcgtctcgatctttggagcggacgcatcggctgaatcgccggtctctttcttatcagacattctcttgcgcttgagggttggtttggcgtctcggttatatggcttttgcttctcggtcaactttcgtttcttcacaatgccatttccagagtcgagctcggagggcttgcgcttggcagtaggatccttcttcaatgtcgcctgcagcttcttccaattactggaaagcgccgtcttgtccattctgtgttctgttggtgagagaagatgggaaagataaaaaaagccgataagcaagtaaattttcgggacccactttttattttgcggatagttgaccaggcgacttttatacagcgccatttggactatatatattatctttacggtttttgattgagtgtttagcgtgtagtctttacttaatttagctgtaagtgcttgaaatatattgaaatcaaacccgatcctaacatctaaccttaggaccacattatatgtccagataaacaaaatgcacgcgcttttagagggaatatgcagaatcattcgtacccagtcttgaaatccttcgcagtccacttctccgtgatctgtcttctggccttgcgtgcctgggtgattggtgtgcgagactcgagcttaccttgaacgatcaaggttcggaatctgtcatccaagagattgccttccggcttcaagagtcgcagagaatcctgcagctcgtcaggaagcaccagctccaacggctgtgcgggtacactatagagcttgttagtcgcaacatggacataggaaatgaaaaaaaaaacgtacgccctcttgccaccgaaggtcttcttacgaagcgcagtctcatcaccagcttcatcatcatccgcatccgattgattctcgcgctcgagctccctttctttgatttgctcggcgatcttgagaatatgctgggcctgttcatctctctttactctcgctgcctcccatttcgctttcccctctgctagcttgcgtcggatggccttgttgcgctgtgtcttggacttccgctcggggcgcttcttgttcagccactcggacttctcgtactcgctttcgaatccctcccaggcactctcatcatccgacttcacctcgccgttgtcgttctgggcctcctcaatcaaacgctgcttctcagcttccttggcctcttccgccaatcgcagcttctcggcctcaaccgccgccgcaccatgtgtctccaatagtttatcccactcttcgaacacagggttgtaactggttccgccgtgcggcactttaacagaggggataggcttcccattggcagcaagcgagatcggggcgtgttttaatgtgctcggctcaaccttgggcttaggcttctgcaggaaatcaaagcgagggtcgtcgtacttgagcgtgggttcagtatcttccgcccacggatcgtagaactcattttcggtcttcttggccagagggtttccctccttcgctacttgctttaggcggagatattccttcttgctaacccagtcgctcttgggcttcttcgtcttcggttcaatgactccgtcggtgacgttcgggtttacacgcttccggccgtccagggcggggatcattgaccgctgggcaaggatttcgtctgacttgaggggtttcttttgctttttggcgatagccttgcgtacgtcttcattaccaacagtatcgagaacgaagagctgatcggaaggcttttccgagatgaggccactagcaggagaagatagttaggatcttaatccacaagtaaagagcagaaaaagagataataacggtaaccctaccctgtgatctcggcgtccttcagatcgcgcaaaccctcctgcaccgcggtgatatcgacattcttgcgccacgccttcttgcccttacgggaagtttgcttgaattgcttcggggcatccacggaggtcgacattgtggaaaacaacagagacagacagtcaacgttgatagtatgaaaatattggcttatctttttttccggtccaaaaaaattctggatctgcttatctcagcacgcgcgggggcggtgatcgcggttaccacgtttaccgcgcttggatgagaactcgcttttcttccgcttcaagctgccatcacttacggcgcgtgaactccctagtgccagtggtcgtcattttccatccttctggtggcacgcttgatcttttactatcgcttttcgaaagtttgacactgcgcttagcgcgatcgcacgccatgcctgtcgtcaaaggaggtgtctggtaagtgccaccgttggaactcgccctcgagttctcgtcgctaatatactcttaggaccaatattgaggatgaagtgcttcgggcagctgtacgtgatataactcactaggaacctctctagcctacgttttatgagcaaaaactaactcaatcgcaggtatccaaatatggtctcaaccaatgggctcgagtctcctccctgctcgcacggaaaaccccaaagcaatgcaaggcgcgatggattgaatggttggatccgggcattcgcaaggtcgagtggtcgcgggaagaggacgagaaactgctccaccttgcaaagctgatgcccactcaatggcgcactattgctcccatcgtcgggcgcactgccacacaatgtcttgaacgctaccaaaagctgttggatgaagctgaatctcgcgagaatgacgagctcggtctcggaggacctggcgaggagagcgctgcccccagtgcggacgatgtccgtcgcctgcggtacgttggttttcctaaagctctgtgttcgtgttgctgataccttttagacccggtgaactcgatcccgacccagagtctaagcctgcccgtcccgatactatcgacctggatgaagatgagaaagaaatgctgagcgaagcgcgtgctcgtctcgctaacacacagggtaaaaaggccaaacgaaaggcccgagagcgtcaattagaagagtcacgtcgactggccgttctccaaaagcgtcgcgaactcaagcatgccggtattaacgtcaaggttgtcacgcggaagcccggtcagatggattacaatgcagacattccattcgaaaagccagctgctcctggattctacgatacactcgaggagaaagaccagaatgaacgccaacgagaagcgttcgatccccggaagcagcaactcgcaaataagagaaagggagaccaggacgacgatgcggaacggaagaagcgcaagaacgataaaagcggcactatggccgcctctgctgcagctgcacgagccggccaaatgcagaagattcgcgaggccgaacagagcagcaagcgacggggtttgaacttgccagcaccgcaggtcagcgaaagcgaaatgcaagatatcatcaagatgggaatggctggggataaagctagtcaaatgaccgccgatgaaacaggcactcgggggcttattggaaattactcgactatcgttggaggaactcctatcagaaccccccgagctgcgccggaggaagatcgcatcgctaacgaaatcaagaacattcgagctttgactgaaactcagtcttccctcctgggaggggataacacacctctccatgagggcagttcatcaactggatttgatggcattgctcctcggcggcaagcgatcgtcactcccaaccccatggccacgccattccgccaggcgaatggcatgggtgcgacacctatgcccggtggtattggggccggtgccacgccattgcgcaccccacgtgaccatttagctctgaaccgggaagaacagggtgcccagctcattggcagcacaccccgagacattaaaatgtacgagaatctcactcgccaacaggtgcgcagcaagctggcctcgctccccaagcccaaacaagccgagtgggaattagaggttccatccgaatccgctgagcccaccacatctatggagatcagcgaagaagatgcggccgagcgtgatcagcgtaacaaagaggcacgggagaaggccgccaaggctgaattcaagcgtcaatcacaagtttaccagcgaggcctgcctcgtcccgctgttctcgatattaacgctttgctgcaacgtgcgtcccaggtcaccggcaccatcgaaggcctgattgccaacgaagccgccattttgatcgcacatgactctcgcaaattccccgtccccgacgcgcagattcaaggccaagcaccaaagttaagccaattggacgaccgtttcttggacgcagcacgagcttctattgccgctgagattgcttccaccgaagcacagctgtccgaatggcaagagaaattcgacgacggctggtcgtcagcacgcgccaagtctctgcctggccttgagaactacgaggatgacgagcaggatcccttccaagaagaacaacgcatgatcgcggcctttgatactgttcaaacttccctctttgatactgccgagcgcggaaacaagctcgagaagaagctgtctttgcactacggcggataccagaagcgggctaagacgctgcggtcgaagatcttggaggctggtgctgctttgcccgccgctataaatgagctggacgctttccgtacactccagatatctgaggagtcggctgtggtccggcgacttgagagactccgggaagcagtgtcatttgttatgcggcgtgagcgagaggctcaagatttgtacaagagccgaaaagatgagcttgatgaacttcttgccgggacgggtacggtcaatggatggcactaggtagtttacttcttttttttctgcgtcatgactacaatatcttgctcttctgtacaattactacctcagtctaatttgacgaaccgtacgcggtcattttctggaagatatcaccgagttatccaagttatagtatgccatgaacagtttgataaagattttgcattgatttagctgcttccttggttgatagtgtccgaatatttgaaggctggggcctctgtggtctcgattccgtgaatcaatgccatgcttcatagatctttatatgaagccacaaaaaaagattcattagtaaagcaccaaccccagcattactattcgaacttaccgatgtcacgccaggctttggagcatccgcttgattctcgtaaactccagcgaaccgcttatcgtacttggaaagagcatccttttccaccaccgaaagatcagggtgagaattgccaagttccaagggaggtagggtctccaggatgcgaatgtagagcgccgtcgaaccatccccaacaaccgtcggatcatccgcattaaccctctgtctgaggcacgcgttgaccttgtgggcattgacctcgtagaactcacgaggcgtgccacggttcgcataaacgtggaagtaaaaagggacatcgtggaacttctcgcatagctcaatgatattcattttgtcagttgtccagccatcccagccgtatatgacgaagatgcactcagtcttgcatgtgcgggcttcttcgagagccattcccagatacttgctgactcggctgttggatcggatccggctgtgggcgggctggatgatggtctgcatcttgtgaggacggacgcccaggaaaccgaactgtttacggtgctcggcgagggtgattacaagcagtgagcgcaggtattcgtgcatttggttgctgttcatttctgcatttgggtagttgtgatccttcaggtttgaggctcgggcgataaacaccaccactggaccgagggggttgggggaatcatgcatagctgtcaaggatgggggttccgaggtggtgttgttaccgacaggaggtggacgaggtttgtccggcgattgcttgaaatgaagcatagccgaagacgatgatatgcgcagagattgagtgaagaggaacgaggaatgatggaatggaagagtagaaaaggaaataccccaatggagatatgaaggtttgtttacgtgtacggtctggtggtgtctacccaaataggaaggcacgtctagaggaaagagcgacacagactggaaaattacatggacctggaaggaaggtggataggaagcgcacattgtaaacatacaagtcggtgagatccctcttggacataactatagaaaagtgacaaaatgatattgatatagacccatttctcacagctcatcgcttcttgatgctgatatcgatctttccaatgccccaggcagcgacaaagactgtaagcaagcccgcaaagatggtgagaggcttgcgcagggcatcgaccatggagtgatcgtacgtaacctaatggcgaattagcataattgcgagatgaacaagtgacaatacgattagtacataccacgaacttggagtcgcgcgcttcgtcagtcagactgtcaacctccagggtcaaggtggtccggcccagagtatccatgtaggtcttgagagtgttcaagtgagcgtaaatgtgcttggcgccaggaagaccattactgttggtcccctcaaggagctcaaagcgaacattgtgagcaccctcagggagcacaacacgcacaaccacacgctcatactggatgccctcagccatcttaggtccttcaatgagggggaccttgaggacataggagtcggagtcgacacccgcggcacggcgcaggaacgaagcaaggtcattgttccacccaatacggaagctgtagttccagcctccgaagatagggtagcggggcttcagctccaaattaccggcgctcttaccaacactcggacgatagcggctggtcgaaacattgccgatatcgtcaatgaagtaaggatcgacagagccaggcagaagcggatatgttagctcacgaagcgccgaagtaggcgctttctggtaggaggtgaaggtccactggacacgcgagaactggttggtcagctccgagccgttgttgcgcagccagtaccgttcctcggttgcgagattgccgccccagtgcgagacttccaagtcacgctctaaaaggtttaccgtgatgacgggcttagtgaactcatagcgaacggtaatggggtgctcagtgcccggggccacctcggccgtgtcatacgggccgtaggtgtatgtggtgcctttgcgctcggggtccgagccggacttgagaccctccgtgggtgtataatccggcacattgttgctggggaacttcaacttggttttctgtgtaaccgtcgtgtaggcggatggcatgtaggcggagaaggagtaggtgaggaattgcttgtccgcctgtccaatggtggcaggaagtgggctgagagaggaaagcactgagtacgagattccaagggtaatctgcgacttcggggccagaggctcgggaaggtgaacgacgaaatactggttgccgctgtttcaattgttagtttaataggcccctgacatggccattgacctcccaattgatactaactcagatggtacagcttcggtatagtctacatcaaagcgtcccttctcgggggccttcttatccctcacttcgaagcctccaacacggtcaaacacttcggcagggaaggggatgtagtagtcgttctggggctgcttgtcgacattctccacaacaacattgatcgtttcccgcacatagctcttttccagattggtattgcgaaccaaatttatgtttttgaaaacctgcgggggcttgaagccggacggaagatccaatcgactaggcgtggtaaggttggttgcagcgcacaggctgggcgcgagcagcccgagcaccgtggcggtgaaaaacctcattctgagtacctggaggacacaatttctccgaggttcaaagggttcaataatccaagatgtgattgtgtctggtcggtgaaccttggaaagcttgcgcagctgatgatacgtggtccccattgtatactagggtcgccgaagcggccacatcgcgcactccggcttatcgctgataagggcctagctgatcgaagcttctcctcatctcgcatctttacttcttgcatacttgatctacttgacttgcaggttgagattggctggaggcacagctgaaacttattttcatatatcatcatgttgtcacacacgatgtttgcctctcgagctgctttaaggtccggctgtttgaggggaacccaactgttatcagctcgtcgctaccatggccttgcccagagcaggttctttaaggtgtcagacgaggtgcgtgatgcaattgctacaggtaaaccagtcgtcgctcttgagacgacaatctatacacacggtgagtctttctgcgttcattcctgggattgaagagcttcgcccaaaagcggggaagccaagactctaatcagctgtaggtttcccttatcctgataacattgctctcgccgcattgttagagtcggttgtgagagccaatggtggagtgcctgcaactataggaatccttggtggcgttgccaaggttggtctgagtacggaagagcttatcgagctggcctcgacagctcaagagaagagcgctctgaaagtgtctcgtagggatctcggatatatctgtggcttagtgagttagctgttgcaatggctcagagaactggaactgatatatatcagggcatggttggtaagaaaatgcacggcggtactacaatctcgggcactatgatcctgtcagaactagctggcatcaagatctttggtaccggtggactaggtaaattcagtgatcaaagctcaatcgaaaaagaagtcaatctgacttgccttaggtggtgtacatcgcggagcagagagctcaatggatatctctggtaagagaaccgtgaagcaaaacaaggatccccattattgacaaatgattatagccgatctgactgaacttggacgtaccccggtaacggtgattagctctgggtgcaaaagcttcttagacatccctcgaacgctcgaatacctcgagaccgaaggtgtctgcgtgggtacattcgctgatggccgggatggtgccgttgatttcccagctttctttacccgagagagcggcattcgcagtccccgggtcattcaaaatgaagctgaagctgctgccatagtttgtaagtttaccccatgtgttgaaagctacagcctcgttgacggaatctccagatgcgcaatcaaagcttccagtatcctccggcatccactttgccaaccccgtccctctggagcactcaatccccaaagccgagatggatattgtgattgaagaagctatccgcctttcccatgtagagggttaccacggcagtgacaacacgccatttgtgcttgctaagatcaaggaactaagcggtggaaagagcgtagtcgccaaccgggccttgattgagtctaatgtcaagcgtgcaactttagtagctgtggaacttgccaagcttgaacaagctgacctaggaacagggtctcggtgagttttgtttctagatacgagatacgagattcaaccaatgctaagttcttcgatctctatccctatagacacatgccatcaattccagatgtagcttttccaagtcaagttgcctcgcaagttgaagatttccccgaaccagccaccgaggcacctattacaccaactctaaaggcagatgtcgtggttgccggctcgttagccatcgacttgtcctgcgactacactccattcggagacgaactcacacaggttgcaccagtaccacatacctccaacccagcaattatcggacaaagcctaggcggcgttggccacaacgttgccattgccgccagctacgtcggcagcgatgtcatcttctgtagcgtcgtcgcagacgatctcagcggccgcgctgcactctcaacccttgaaaaagaaggcctcagcaccgcaggcatccaagtcctcgcagcgacagcaagcacccgcacagcccaatacatcgcaatcaacgacaccaaaaaagacctcctaatagccatggccgacatgggcatcgtcgagctccccgaatccgaactcgacttcgacggcttctgggaacctctcctcgaacgcacaaagccaaactgggtcgtcgtcgacgccaactggcggcccgacgtgatggccaaatggagtgctgtagcacgcaaacacggcgcccgcgtagccttcgagcccgtttcaacagccaaatcccgacgtctattcggcaccggcgcgactatcggtcccaaccagatcgtgccaaatgatgctatcagtcttgcgtgtccgaaccgcctcgagctgacggctatgttcaatgctgcgcgggaagcatctcttttcgagtccgcggaatggtggcatctcattaactcaatgaatatgtctccgacgggctcgcgccagcaactcattgcgctcacttcgctgtctctcgttgacgagggcattccgcagcagactgttcagctgcttcctttcattccttgtatcgttactaagctcggtggtgcgggttctctcctcactcagcttctgccgcctggtgatccccgtcttacggatccgaagtctgcgccgtatattctttctcgcgcgtggggaccggacttgcctttcggtggtgtttacatgcgtctgttctcgcctgatactattctagatgccaaggacattgtcagtgtcaacgcggcgggtgatacgctgctaggtgttgtggtggctggcttatccaaggatccttctgtgcgcgtggaggatgtcattcctattgctcaggaggcgagccggaaaacattggctagcgctggaggtgtgagtaaggaattgggtgagctgcggggcttattggggctgtaataggtagctgtgaccccgtactaatgacgttgattgcctggatcggaagtcaactcgaggcactagcttgctcagcggtgcttggccaagatctataaaaagaaattaatcgtttagacagacatcgtttaacaaagactttatgacttaaccgattgcaggatgtaaaaaagggatgtgctgttaagacgtataaaatcattgccatgttcattaagtacacattagttagtcgtggacctcgccttcagtggccgagcgaggttcccatcccatttcagccatctcaaacgactcgaataagaaggccggcgccaccgtacaccccacgagtgtccaatcacctagactcctcgcatgctgccactctccacgctcaacgatagcctgtggccgttcgccctatatcataggaattaagcattgccaagtggagaaacacgcgaccatatatataaagaaataactcacctttgcaaaatcaatgcccagaatcatgtcccgggtgggtttcccatcatcccaggatagtgatagttgcataggggcgccagcgtagtagtgccatacctcggtgccatcgagaacacggtgccattgcgagaggccactttctccctcgagaaggtaataaatacaggtgctgtgcgagcgagtgtttgatgaatggcggtcgcggaaggtctcgacgtagtaccctttttctggatgtggggagagattcaaggtcttgataatctcttgtgctgaaagatttttcgccatgctatctagagagtagagatgtgcttgggttaaaagaaaggagacggtgaagtcaaatatacatttgtttccctatcccctcgattagtcagttgtggtattgataggcgtctgcatgcttctctcccctctccttagcaaatcacatctcggtgacgtggtgatacgatgtagatctgagacaaggttaataagcaaagcaatccagctgaaacatgcagatagatgcaccagttggaggcatcagaatactttcacatccttccagttgaaccttagcccggaatcattgcgagctgaacattacgtatgggcaacatatatcatggacattgatgaagtgactcataaggttagccctacgttcccaaaatactatgcgaactgtctcgcccgcaaaagcttcgaggggcttatcctcgtcagcgcggccacatgtccgttgaggatcacgacacttggctcctctcgaagcgcatttgaatacgaaaactccactcccgataagtatatcgttttgataatccctattaatcattatgcagtcattacaagacagagacacctagtgctaaaacactaaccaacgctcaatatccttcgccggattttgatgacggcacaagtcccggatccaacaatccaacctgcactagcacaccagcctggtcccaataaagattctggcgtgttatttgaccagcattgaaggatgccactacaacgataatgacctggatatctcgccccgtcggcgaaacaccaggtagcagccatggaatctcagcagtatgccgacaggagaacaacatctcatccacgatacgatccacacctacagtgcgtgaaagcaggcggatttgctgatcaaccggcccagcaggaatatacacatgagcgaagaaatcccgcaggcttgcgatatcagagcctgtaatatacatatcagtaaattcccgaaccagatcgtaggaaataaaagaggaaaagaaaaactcacccccagcctgagtaggaatacacttcacaaagacctcaccagcaggacaccccatctcgccataatgaccatgaccggtcaacatccccaccgccggctcagcactagaatgctgatgttttttccgcatctccatctcccccagcacacggtcccagtattcttcccagacagtctcgatatcgataacagcccattggctcccaacattgaacgagcggcgcagacaccctagcgcgcgactccacgccaattgcgagctgatctcgtcatctgcgttcaattccacatccatttcgccttctttctcctcggcaacttcccgctccgcgaacccggctttggactccgggtacgtgtacacgtagcatcggtgttttttcttgtaggtgacgtcgccttcggaggtgctgagctcgatccatggccacagcgcgcagggctggactcgtgggcctggaatgtggatttggattgggaggtatgttgacttggcggctgggccgaagattgcagctgtgtctgagcagcctggtggcgagcagttttctttttccttgtaggtgaattggtcggttgaggagagggggtagtaggctatcaaggcacacaggtgtgggaatgggtttgtgttgctgtatactatgtggtgtaaggctaggaggaggtaggcaggtcggtgatatgctggggttggttagttgggttttgctatatcttgcagggctgaggtttctgcttcgaataacaaagcatatatagaaatagacaagaaagtataatagaagacgtaccaactatcgcataccgctctccattctcgagttcgtcttctttctcgtgcaccgcattcttcagcgctttcatatctctctctacattcccgctgccgaggaacgggatatagatcacatcgaatccttccgcctgaaagaggtggactagatgggtatcgaactccacggtgtcggagatcaggatgaggtgtcgggaagatggctcttcatatcgccagctgcgtgtgccggagctcgtgctcactgtccggcgtattccgtgcggatgggatgccgcggaattggggcccgtggtgtctgcgtctaggtctggtgggttactgctggagctttgggctcggcgtcgagtgaggcgttggaatacgttgaccatagtctgaatgtggttgattagatgagctgtatttatattgggagtttaggaggacatgtagtccttttatatatggaagtttctgcttcgtttcgggaagctcgggttggagttcttggtattacatgtgtcaagacgagaaaatagatgccaatgcttagggtttcttgggtgacgtcgttgatgttgcataccacgataagatatggtagggctgcacatcttcatgcttggaaaaagcatctaatagaatctagaaatgacacgtcaacaaaaagatccttcttctatgtctatacagcgaaatgatctgcgctatagggaaaataatcgcaatgaaggatactcatctcgccaacccccaatggcatgatatatctgaccccacttaatcaaagctcaccaaccaccgacgatcctcgctgactttctcggatgttttaccgctgtcaacaagatagctcttgtaagcgtcgcgcagcagactctcccgcgcaacctcacaatccacccgaatatcctccaccaacgcctccagcgagacataatcaaactcaggccgaatataacccagaatcagcaggttgagtcgcgttttgtagaaatccggcaagcgatggaacttagtatggccctcgtgccccgcagcggtgggcgatggttccgtgagagcgggcatgatatggatttcctaaagtggacaaccacgttagtccgataccccaaaaatacgagcgcatttcgtctagtttattgtatatcacgtaccacagatcgcacggtatttttatagaaagggttatatccgatactcaacacagccggcaaaaccaccgcagtagatgtgctgccctcgactatttcatgtttgtatgttttcgggtcgagcgctacaacgccgaagtagacgccgcttgtcagctcggggtgcttctcggacaggtcgtcggcggggatattggcagtgggaattccgagctgtagtcatccgggagagcgagtcagcggtaagttcattgtgcgtgttgcgctgcgcgattatagcaccgaggttgagtccgcagagtcatggacgtacgtctttgctcccgcggccaaatcccttgatcactggccctgacagtcgcacaggataaggaggttccggggtatcggggccggctacccggtcgcgcagcttggagcccatcgctggcggttgaggttgaggttgtgtggatacgggtcaggcttgggatgtggtgaagcgtgtatattggcgcagacaaatctgctaataagtttgttttgtttggcgtatactgattgtgtgatttagcaatggtttggcgtgatgctggcgttgagtgtgtctgaatgcgaccagccctggtgggggttatcgcgataaggatgcattgcgtacataattaaggcgcctggggtatcaggcattaaaccacatgtaatctcgcaaaaagcggcaagcactaaaacggaaagggaacgccaagaagtggcagaggaaatcaagtacatacatagggagtagatatatatttctactacattagactaattacttcaacacttcaacccaagtacattcccgtctctcatgtcctcagatcgtttcagatcgtcacatacaatgctattagtaccgttccggagtagcaagacagtatatacctacactagcaaaattaagtcacttttgtcaaataactactttatcatctgcttcatcgtcaacttatttaaatttagatccatggatggttcaggactcaacgaggtcagaagtgaccccactcaatatcatggcattatgctcatacagtaactatcccgtcccagcttttgtcccattgtcccttttgagcgccacaaataaaacaagaaagcatatcgacaatcctggaattgattccaggaatccaagaagcataacttatatacgagaacatagaacatgagaagaccctgtcggccagtggtccaaaagaaatcaagtccaaaggggatcatacaatcccagaatcaggaaatatgtactgagtagaacagcagaagaaaagaagacaggcctgatgtcaggccttgccgagggtatgaaaaggtaatctgaaacaagagcaggaaacaaaatcaaatgcatggcaagaactggaagacagcggattagcatgtaatcaacttcaaaaggtcgtgtgatattaattagaaactcacattcatcacaatgagcatcgggatatcgaacacatcgcgtttcactgtccagcagtacgcgcattcgacttttccgtccttgagaccgagctggttcatgccggcctcgccagcaatgccactcttgcggaggtggttgttccactttgcattatcatcagattgtgaaacatccatgtcctccttggtcttatatttgagcagcttgcaccgagtcatgacactaccacgagaatcgccgaatgccagacgcgcaaagtcttcgtagaactcgacaacgctgtcatcgtcgaggagttcggccaagaataccggttgggggcgtccagtgttggcatactctaatgtggagccgcgcggtgtgaaactcccgcgtgacgttgtcccggattggggtacgcccgaaccggtgttgacgttgaggtttttatcttttcctagaagcacgtctttcttccatccggttaggatgctgaattccttgcctacggcggcgatttcgccggtgcgtcggcagacgatggtcggcgttccgcatgcattgatgaagtcctcgtactcccagagagttcgctggaagcatttttccatgaagatgagatcatcgcgattaagggttttagtagttgcgataaaagagggtcgaatagacgcaagcgctttagcaattcgcacggtcttttgcggcgaaaagcgacgctggatgaaagcagtgaggttgtggaagccacttgtgtaagcatagggctccttcacgctttcgtatattgaggaaggattgcggtggcgtcttttagaaccaacatgcagatttggatgcttcagtattgatgctgacgtcacctggcgttgtccattcggcaccaggctgttggacttgggagcagaagcgatattgttaaatgtcccgtcctcgaatgcagccgttgtaatgttcgggcttggggctgagccaggactagtgaagtttgttggcgcactttcgatcgcaaatgcatgtggtgcgttttgtttcatgtgttcggaaagcatggcattttggccatacacaccgccgacattcacatgttggcccgagggtgcggtcgaccattcgtttaggagaggatcgccaaacatgaaaggttgattccccgggctttctccgaaaccgggagctggtgtggagaactgggccgagccactgcggccgatcgaccctcgctgtcctgcagaatcagtaggagagtcaccggccgcgccggtggccatgtgcccaagcatgccgaattccagagcaccgtatcgattttcgaagttcatactcgataaatcgaagttgaagagagctggatcactgggatcaaaaaatggccctgcaaaaggattttgagactgacttgtatccccagagagagcagtacttggagtagcctgctggttcacagttgatgaaagacttggatttcgaccattggtgctgctcttcatattgaaagtaggtgaaacgggtgattgcgtggtaaaagggctttggctcatcgaagattcttggtagggattgtaggatgctgtctgcgtctgaggcgtagggtaaaagttgttgctcgtagtactggttgtttggttattgtgttgatgagtgtgttgttggctgagttgctggttggagttgacagcatttgcgccatttctagatataggcatattattgcggagcgtgttgttgtaaagattggtgctgttgctgctggtggtactaacagctggcatcaatgccccatcgggagcgtcatggagatacttggccttcttgcgaacaccatcatggcaagcatcttgaagaccacgtttgatgcaacgttgacacggtcgttcgtcgcctaaacccgatatatattagtcagatcgctaacaagggcagggatcagtctatcatcataccgcaagtcaaatgagctcgttggcatgcaaagcaagctcgccgagccttctttcgtcgcggtcgggagggatccttggcattcgctgctttgcgatccgctttgctatcgccattagttttgggctttatgtccatttgctcgtgttctgtgatatcggcagagtcccgatctccactgtagtcccctgcaggacccggggagccgttcttagcttccatattcatttcggcatgtaccccgagaacggtgatctatggacgcgtccacaaaagtgagggagatcggtgtttcagatccagtaggccaccttccgtgccttcttttgttgatctaaagaaacagagcgtggtggcgacaataccaatgataccatgagcgcttcgtttccggcgggcgagcggatccacgtgcacaatattcagcccagcttgtgagtgggaaaaggaaacgatcgcaaagtcctaatcgtccgtgtaggttcttgaaatccacccaaatcacctctcgaaggttggagagatctccggtccttggttcctataatcgcgcgtttgcgactacagttggtggggagtcggcaccggaatcacggcgagtcgagtcacgggtgtaacgggggacaatcgactggagaagcgacggatgtacgatgatctgacacattgaagggtttcaatgtggtgggtagatagggagaaactggcgcaaagctaacagcagaaaaataccgcaatggttcggggctggagtggagtggacggcttcgttcggttgcggggaaggtgtgaatttctctccaaacacgagagccgtgccgatgcgaggccggtcgagaagctcaaaaggaagaaggtcgagaggcaatgcaaatattattcgcgcggagggttgaagaagaagcggatgattctaagaagggctctcgatcggagtgttcccgtgactattgtctaagcaacaggactctaacacgacacagtccaattgtaaaggacttgtagaggactaactgagactcgcttgagcgatggaatcctttttttttaatccttttttgtgtattttttatatatttctttcacaatggcttttagaattttggcactatatttccctactaaaaaggcgcaagactatacttagagtatgtactccgtaaaaaacagccactattttacctgattaatttttgttttttttttttttgctacccaacctaatctcacgttgggcgtgtcttaattgaaggattatctctgatcagaaatcctgcgagtatagggttctataagaaccaaagggctctaatatgtacatcatacattcacatgctgacgttcagggcgacggtcactggaggcattattagttatgtatttgactatgccaagtattacggctttcataacattaccagaaacaacctgtaatttaagtgcatccacaggctctgattggttgaactacaatccaataccagatcgggttcagcgcataccagatgacctagacaattagtagccccgcggcacgtgcctaattcgattgtatactctgtgccttgttagcttctaaattacccaacgttcaatgcaagtatatccaatttgagtcattatttttttctgtcaagctgaatcgatcccgagaaacccggtccagactttccacagttctcggcagcacgctccgattccgttttgttccgaggcagactggatgcgctctgccgaggctagaaggatcgcgacagttataccgctcagctatgactgtacttttaaaggagggattgtcatgtctgcttgccgccaggggtaagttggttggggatgattgccggtgcatgaatttcaagaccacatgaccctcgtatgcttcgcaactggactggcagactgggggtcccgtcggagaattaaagcctgggccaggtccgcctagtttctattcttggcgtgggtgggatctatttacccctagtgtgtatataaaccccgctagtacatagtatgaaaagctataggtctgcttgagattaagaacggctagatcgaatatgcaagatgcttatatggaatcaaatagagctaggatatagagcatatccttgccgatcatgcgtattattaactatgattttatgcattggcttttacactgcagacggtacagcagctcaaagcgttatgtcctgacatccccagtagccaaacgtctcagcccaaggggttcccaacatctggtcatggatgccgtgttcatctccttggcgcacggtgttcaagaccggttggtaaactgttgagatgcaatggcgccgagggtagacctgtgtcctcgcgaaatagccatgcagccagcgaccaacccgcttgagattaatgtatgtatgggttattatatgtgcaccgcagcatcaatcacgtctgtgatttcgcaaacttgcttttacttcggatccatgccccatggcgaaagaataggtatctatcatcaatgtcagtacaatgttcggcagacagatcaactcatgttaagttattgtctttagatccacaaggaagctgggatgtcaaacttccatccttgaggcgacttgctggggtttcataatgcagggggaagaaataggtatagcgtgagaggaaatcaagtgtgtcaaaaccagcacgtacggaaaagggaccatgacaagggttaggaacgctaacaaggaagttgcccattgatatccaaggttgtggtacactgcataaccgttagccataatcgttacctcaactgtgtgcaggcaagaatgtagctgtcaagcattgcagaagagctactggtcggcctgttcagaatacagcgcatccaccgcattggaaatatgcgcttcatgcaaagcacgggcttccaattcttatcccagcacaacgagagtgtagacaaacttactttgtattccaaatagcggaaatatgcctccaaaggatgaccgagcgaagctgttcgctgccagagcgctggcggcaaaagtgggatatgcatcgaccaggaatgtgaagatacccgagtagactaggatcgtcctagcagtaacacgatccaattagcatcacgcggccgaaaaatgcgcagacaaggatggtcgcccggctaggtggggttgaaaggttgatcttaccctgcaccaaaaacagcactgccaataataggcgcaatccaatggacgttgggatagattgtccaagcaaaaatgaaaagacctatagtaaccaagggtcctcccaggatcgctattccatgaaagtcagccattatactcttgggaccttggcgcctgagcaattatgttggcaaacttacctgggggcagtcgccactccggctggaagtcatcgagcgagttagtggtttttctgtaattgcgctccaagcgaatgtaattttggcgccagatcggatctgacaaaatggctataaccattccgacaaacagaccgaggaaacacagtccacgctgccatattactagcccatacacatcattgaagactagctggaaagcaccaaagaagaggtacagaatacccaagaggatggccgagaaaatgcaaaggcatagacacattggctccaatgttaagaggagaacagggcggtacatggatcgcagaactgtctgggtcacagaccgctgcagcttttcgattggagctttccatcgctcgtctccggtttctaggcgcagcttctgcgccttacgcctcaaaagtctagaacattattagcgtcgtgatttatcccagaatctggaaatacatacactgggtgatatgtctccggaacgaagaatataatcgaggcgagcatcactcccgtccaaatcaagagcacataaaacgtccaacgcctgcgagtgatataagcttcaatagttgtcagaattcaatataaaacataccatgtggtaaatgcattaatgaagccaccgactctggtgattatgttagtattaagatcagagggtaggcaaaaagaacgacctacagaggaccaacttcgggaccaacaaatggactcgcagtgtagagcatcatgggaaaggcaagctcatggcgatcaaacatgtcaccaacagtgcctccagcaacactcaaaaaggcactgcctgaaagtccggtgaaaaaccgagcgataaccatggtctcagtattcttagccaccgcgcatgggataagccagatgagaaacagcgagtacgaaacgagatagatgtttcttcggccatagaactaagagaattcagatcagcaacgcaatatctagcagccaaagtctcaaacgtacttcagataatggactcagaaagagcggaccaattcctaaagcgaaaaacatcaacacatagtcccgcgtaagacgacaagatcagcacggaccaagaccccaaataaaaaacgacaacccaagagtcgcaacttcctgcgagcatccgaattcactcatcaactggtcatatgtcgtggtatacatcgaagaggcacaagtcctacatgcagtaagtcagcttctatgcggcgcagagatttcaagaattaaccggctgtacactcacacgcaaagagaacccatcgagataataacgacaaccaaccatctccgggctttgctcatatttcgcggattcataggatcgttctcctcccagcccacaatatatgattcatggtcggtcgccaccgcagcctcgtcgacatcatggctggcaacgctgacgccgtcattcaatgaccagctgcgttccaggggcttggatgtaactgatctagacgcgctcgagcgcagttttcggagcggtgtgctgccttcttcgtgagtacccggggaggtgatcgcagcataactcagatcatcggatttggtgcggtcgaatttgatagcacccttaccactagagggtctttcggggccgatgcgggatttttcttcgctagggtctgggtgcgacacgtctgtacttgaccgcggagacatggtcaatgggcaaacggtcaattgttagatttgatcatctggtaagtctttgtgttatctatgaagtcataggaaacaaatcgaacggtatggagctacctgggtgtatgtattgattagcggaaatgtgagtcactgtcttgcgagggaaaatgaaggggattctccttagcgtctagaaatcaaattcaacctcgggacttccgagctgatcaatcagtttacggggtcctaattccgctatctcgaagccgacctcgggagtgattccgccttggacattgattaagtgtaattctaaccatatgtatgtaatgttgtagaaaattcaactattctacaactagatagacatatatcgttttcaatgttttgactgtgacattagttatcggatgccaagaacgtaaacacgtgggaacgttggtgcatgtcgcacggagctactccgtactccgtatataattctccgagatcgtaggtctaaaacattgcagacaagaacaagatatgcttgagacagagatatgttcaattaagctagagctaaaactactacggaacagaaacaattcatcaacgtcgcttccaagggaccaggtgcccaaacaaaaacaccaacaaaaggtagtaaccaaagtcctgtctccaagctaaccctaaactcctcatagccattcgaccgaatgctattcccaaagaaaacaccggatctcaaatcgagatattacggaaccatcccaaagttgagctgtacaagaaaagaaagatgcgccaatagatcccagaattttggccaagaggacacattctctaaagagcctggctgagctgactcatggcaccagaagcgttttcctcggcccaagaaccccagagtgcctgctttccagtgaccttgagaggaccaccaatagacttggcgccctggtcaaccttgacagcatctttcgtggccaacaccaagatttcgaagaacattttggtagcatcggccttgctggaccgctgctcgggaaggagctcctgaaacaaaacgctcttctcctgctgggtggctgggctaccaagcttctcgcggagaatgtgcacagcgtgcttggtgcccattgaaaccggttcggtatccacggggtgcgcaatagtatcatccagctcatccatgggctggttgttatcgtcgtcctcattcaagtgcaatacatcttcatcatctccagggaattcaatctcagagcgctggttcatagtggtatcgagagcgataccctcgtcaatcgggaccatggcttcctcgtcaccaagatccagggcaggaacgtcgacggcagccacatccatatcggaaataccactatcgcgcttgcgcttcagctcaccggctttcttgacggaatccaaagagagcatgccgcgcagttcgggtgcccatccgcgtccacggtcctcaccaaacacactagacacaaagttgccattctgctgtctggtcatcagagtgaggagaacggggtcgcgtggcaagaatgatgcgggcttcaaaatcgaagagcggtcattttgctggtccttgatcttggagctggagatcgcaacttgtttatcgagtcccataagcttctggcgcttggtgcgttgaccctggtgggcgctaacggcatcaggggttgcggatacatctcggttaatttcctcttccagctgatttatctgatcggatccagcatcggaaagggggctttcggagtcacgttcgaatcggttttcggcagcacggggcgtctcgccaccatcaaagtcgttatcgttgttgaagtccatgggaccatctggcagtaggtcgttcaggttgtcgtggacatcatcgccaaggtccatcttgtcgagagcctcatcatctccaaggtccagtccgagatcgtcgtcgtcgttgaattttccagcgtcattgaacagatcatcccctacgggacggggcgcgggagcatctcgaccaatttccatagtcgggtcatttccaaggggcacttcatcgtcgctgaagttaagatcaacaagggaagggtcttcaaggcgtgcgggttcctgagaaacagagcggcggaagctactgtctgggaggaattggcttccaaaatccatgccaccagggcgcttgccagcaggctccagatctagagtttgagggaaaagcagagacgtatcaaggttggtgaaaagatcagattcagtgagcacgtcgggaagagtaatgccacctggagcgacgacagtcgaagtcaaatcattgttgtttgtgagacggaaagcctgatgtatcattagattgaaccaaacccccatttatgcaaaacaatacgtaccattttaattttcatcagagcttcattgcaatcgtcgaggaggtagcgagccttgcggctataaattcgaaccacacccaacagcaattgaccacttaatcgcagagccataggggcttgaccctgatcaacaatagcattgacactgctctcaatatccgattgcaggatatgcgactttgaaagtttgcgttcgatattagccgacaaccaaacgcgagccaacggcccggttttcgacaaaagggtctcggaatagaacatggtgtgtttgtcgcaacgagatcttttacaacggcgagatatctgtcaccaaattcggtaggcgaaaaagacccgcccggcgcgggggtgaggtgtagaaaggcgacgcgctgaagccgggaaaacaatgacttgtgcgaggattcgcacttgataattgtatgaaaaggtagatatgtgactaagagataaaggtttatcactcgatcgcgtgaaattaagacatcgaagagggagatggagagggtatgtgcgcgggagggatatcttggagttggctgagaaaccaaggaggaacggaagatgcgcgtcggtgggaatatcaggcggcaatggcctgggcgggatttttgctgacgtaatcgagggggctgggaatgtcgggtcacgtgagggtacacaaaggaacttgtacggagtccataccccgacgtatcacaacaatgaatttgctacgaacgaaaatttgcctcgttaataggcaaatatggaagagaatatcaattggactttttgtttctcaccaaaccacagaaaactcttgtataaatcagtgcatcgtatactctgccctacacgtgataccttgcgctagtcttattatagtatccggataaactccctacccgagatagctaggccacaatgggtaaagcatcatcatggggacttaactagcctcttccaagtggactcggtactctgaatgggaatattttgcggttttgattttagcaaaaagctgtttcaaatcccgtttttggtcccaggtcctctgtcggtcccttgtttgtcgtcgaccaacttgcgccgactccgcaaatccagcagttagttaagccgcccccgtgtccacgggtgaatgccagatcgcatctaacgtttattgtcgaaacatagtcaattcttacccaaacgggatgaaaactacttctcaacatatctaacgtcatattttatcgcctttaattatccatcctccaaagcatgagcaatgtcaaggtccgcgacaccttcattgcctttgcataatgcatcaaacagcgactttcttcgaccttcctccacaacagccatgactggacggccaaatgctccatcatcagtaagtatacttgactcacgtaccacgtgtgctgcccttcctccacttcttcacgccgtcagacaatggagtttctaacacatggtcttgttttcttccagacatccacttccacatattcatggctcgagcctcatgaaactgccgagcgattacgaacctctattttacatggcctgacacccgtcgaggcagagatacgcttagccagagatggaccgaacgagcttcctcacgatgagccggaacccctctggctgcggttcctcaaacaattcaaggagacgctgattctcctcctcctcggctctgctggaatctcttttgtgatgggcaactacgacgatgccatcagcattactctcgcagtaacaattgttgtgactgttggctttgttcaagagtatcggtcggagaagtcgttggaagcattgagccgacttgtacctcattatgcgcatttgatccgtgatattccaacaagttcctccgcggtgactgagaatggtggttcatcgcccccaggtttctccatggaaatggatgaaattcggagcaaaagcccaggctcggcgtctgccgcggtcaaggcttcttcaacagtccccgcgaacgaacttgtacccggagatttggttcttttcactactggagaccgcattcccgccgatattcgaatcactgctgcaacagatctgagcattgacgagtcgaacttgactggagagaacgagcctgtagcgaagtacacggaagctttgcgcaccacatctggcgggaccgcttcagcgccaaaaggaatagcaccccctcgatctcccttctacgatgcaccggcaagcggtgctgttggtgctgacattcggttgaacgagcagcacaatgttgcgttcatgggtaccctagtccgctcaggctatggtcagggaattgttatctcaaccggcgcaaatacggagttcggcagtatatcagcttcgctacaagagatcgagagccctcgaacaccattacaactgtccatggatcgtttgggacaggagctaagttatatatctttcggtgtcattggattgatcgtggttattggtcttatacaaggtcgcaagattctcgaaatgttcacgataggtgtctcgctggccgtcgcagcgatcccagaaggcttgcctatcattgttactgtcacgctcgcgctcggcgtcctgcgcatggctaagaggggagcaatcatgcgaagactgcccagcgttgaaactcttggctctgtcaatgtcgtctgctcggacaagactggaactcttactctcaaccatatgacagtcaccaaaatgtggcatttcgactgcccagaaccattcgacgtgcaaagagaaatgacgtcagttacttcttttggccctgcggcgcaaacaatcctgcgcgttggtaatattgcaaacaactctcgtttgtcacggatgcacgcaaactcgccggccagcgcatcttctgcgactgtactttcgtcgaccatcaacagtgattcggctgctgccaagagtcgatgggtgggtcagcccactgatgtggcaattttggatctaatggatatcctcggagaagatgatgtgcgcgatcgtatcagcgctcgcgtccatgagaccccattcagctccgagcggaaatggatgggtgttgttatcggcgattctggtggttcaaatggaggtccccatgttgcctatattaagggtgctctcgaacaggtcttggcgcgatcggatacctatctcaccaaggatggtcgggaagtaattctagacgagccccgtcgcaagattattcgggaagcagcagagaacatggcatcggagggtcttagagttcttgcctttggcagtggagttgttcgtgatacttctagaggtggcagaggctttggcagtcggtcgtccccgaaaatcgtacaaggtgatgatgacgagcggtacaacggcttagtctttgctggattagtgggcatgaacgacccgccgcgtaaagatgtgcacaaatccatccgacgcttgatgtctggtggtgtcagagtcatcatgattactggcgacgctgagacaacagctgtggccattgcgaagaagcttggaatgccagttaacgattccccgcatgcccgttcagtcatcggaggcgatgaactcgatcgtatgactgccgctgaacttgcccaggcaatctcaacggtctcgatctttgcccgtacgagcccagaccacaagatgaagattgtgacagcacttcaagcccgcggcgatgtagttgccatgaccggtgatggtgtcaacgatgcgcccgctctgaagaaagctgacataggtatttccatgggcaagctaggcaccgacgttgccaaagaggcagcggacatgattttgacagatgacgatttctcgaccatcttgcaggcaatcgaacagggcaagggcatcttctataacatccagaacttcattacgttccagcttagtaccagcgtggctgcactcagtcttgtactgctgagcaccactcttggcttcaagaatccgctgaatgctatgcagatattgtggatcagtgagtattcctgcatccgattctatcccttgtatttcactaacaactattacagatattcttatggatggcccacccgcccagtccctaggcgtcgagcccgtcgaccctaccatcatgaatcgcccgccacgacccaagacggcccgtgttctgacaaaacctctaatccagcgcgtcctcacctcagccatggtcatcatggttggcacgttgtcaatctacatccaagaaatgggcgatatcaccgacggtaacccagtcgaaaagcgctcccgcgtcgtcaccgcgcacgacaccaccatgacattcacctgcttcgttttattcgacatgttcaacgcattgacatgccgcagcgagggcaagtccgtcctacgtggtgaaatgccgctgtttgggaacaagatgttcaattacgctgttcttggctcgttggccggccaggcctgcgtgatctacctgccgttcctgcagcgcatcttccagaccgaggctctcgccttcgggtccttggtcaagctggtctgcattgccagttcggtgttctgggtggatgaaggtcgcaagtatctgcatgcgatccgtcgtcggcgtggggtgggttctggttatagcgtcaatgtctgatctactgagacaacgggtgtacggttcggatttcctgttacgattttagaggtgtccatgccataacgtgtagtttatcatatttggattgatatcccccatatacataatagaaatgtcggctgtcgtcatatatgttatgccttcggacccataactatatactccgtatagcacaacgttatggctactctgtactcatctcccactaacccgaattctacaaatttcgatagacgcatgttaatagaataccatttcattcccttgattccttgttgacttgaaatttccaaattcatagatacattgctcaaaaattcccacatttctcgaccgacgagacccagttccccctcttagagaattgcaatcctaaacgaagcctcaatatcactggcgagcacgatatagagtgtcatccgcagtcagcattcccagataccataagccaagcgcaaccgtgagctgcggctctttggatgtgccagtctgggtccaggggatcggagcacccagcttcaagttcccatcatcatcgactcgctgaattggaaccagctcttggtcggtaagaatgaagccaaactgcgtgccatgctgcgtcatgtaccagttcacttgtgctagaggtttgaagaattctggatcaataaaagaactattcatcatgctgggtgaccatttccatgagggcttcaggtcgcctggaaggcggttcagactcaggacatttctattgctagcttcaccagcttcatagatcgaaagatctgggatgaatttcgccagcataagagcatcagggcctaccccgatcaagatattggtgccatcggaaagcacgtcaaggactcgatcgagaacttgattgaaaagaagatcttccggttggcttggagcctgaggctcagcctggggatcaacttggggctcggcacgttgctcagcacggttatcaagatgttcaaaggtacaccgcagggaccgccgaatcagagcgtgaaggtcttccccaaatgcgaggggcaggtcactttcagacgtgagctcccgttgtggactcggggaccgaatagtatgacgctgaatgcgaattgccctgagcagcgggccaaattcatgcatgatgtcgtctatattgaactccgtccagacaccaacaacattgatcttgttcggatcatacgatccattgttgtgctttgcttcgattgtccgacattgcgaacttgaatgcttggtggtgcttgtagcaaataagcgagtagagtaacttggtttgccatcttgaacagaataaaaaggttgagagatgataagtcttgggaaatgatagttatcaggaaatgaggattgttaggagatgataattcagaactgactcctgtgaataggtgttttatatatttgagatgggaaggatgaaaggcataatctattagcatctccttcctattcgaggtcaaccgaaagcccacgtccccgaagcgccatgacaaccaacagcgggaactgacagaggtaatcattggcaatgctcactcgaatcaaagcgctaagtgtgactgaaacgtatacctgcagcgggggccgtcaccgggtacatatgcatacaagccacaagaagatcactgacctcgaataggaaggagataccaatagtagtaataggtcatcataagaaaatcattaactatgctcactcaaagcgaagcgctaaggcgtatccttgcaccggtagctttgggatcagaccacaggcccctctaggtctaacagatattactttggtctatgtcatggcctagtggtaatatgtgatatccgctcgaaattgtaagtcgttttcacctgtcaccaagaagggaaagaatttcaaagaaaaaaaagtgaaagaatatgcgagaagacgtctaaaaaaagactatcacaaagacatcacagagcatgagcccactatgtattctctagggctgtaaatcacaacatcgaaagccaaacgccgtgacctacatagaagctctttgacttgtctttgacttgtcaagccacacttgtaaatgattggctttgttatcacaactcactcaacgtgaaacgctgtgatcaagacacatgcaggtgccttggaagggatgtacttttgtatagtcatattctgccatataatgtcgccttcgcccttctatcccttcctttttctccctccctattccacttatctttaagacctatcgcgctggaaccaagatgccatcatcattttgggagcactatcgtcacccagcgaagaatattcctccacgtaaggtttatgatgcacccaagattgatatcgccgatgtggaattcgttgagatcatgaaacagacggatcgttcatttctatgccgagcccgctggcaagacaaagactgcgtgctcaaggtagtaagcgaggaagtcatatagcgcgccttcaaatttaacatctaataggtttactagttcattccttacaaaccggatacttgcgaatcaccgttccttactagggatctttttacaaatgagagccgcgcatatagtcgattgaaggccggtggcttttgtgaacgaggatcggtacctgacttctatggggtagttgagaatattgaccctgaggcaaagagctggcaaccacagctcaagaacttctacaataaaacttttcggagggtctagatccagaggctcgcccaaatggtgtcctaatcgaatatatcccaatctaaatatgatcgatatctctaactacatagagcaaagagctcagaaactcaagcagcttctggccgagattcataaggctaagattttacactttgatccctatccccgaaatatgctgattcagggtgattctgatcgggtactctggatcgactacgaacattccgaaatttatgatccagaggactcaaagcatcccagatgttttgcatatgaaagcgaatgtatgcatcacttcatggaaaggctggtaattttatcactcctagtttgattataactttatagctgacttgcaattctagggcagagatcataagttaggggagtacaaagaaacgcggaatatgtattttgactgactcttcgcggaattttgatgccatttccagatgttgtgctgatacccaattgcatatctccgagatacctttttgatcattctccaattacttatcatggcttaatactgttgaatgccttgtttgtcctatttgataggcctcatccagctagacgagcaggaatccttctcttttcttctccgctctccgagcaactccgcaaaacatgattttaatgagcagtaaaagaaaaaggtatgcccaaggagaaaagaaaatatccttcggtgtatattgtattgagcaaaaatactgaccgacgcagggatcgaacctgcaatctcttgattcgtagtcaagcgccttgccattgggccagccggccccctaataaagtaaaggtattagtcccttgatatcaaaataaccaaatcaattaatgatagtatgaattatcagaatcactcccttccaaatcaaccaatttagggtcaggaacaatagtagcattagtagtagtggcactaagagagatatctattacgtcagatctaccaccagagttactagttttactattttaactataggatataaagacgagatagaacttaatatttttaatactttattaggtaaaaagactatatatattctttagtatattctatatcgattataactataaagagatagcttttaataacgataaatagcgctagatcgactaacgtattcggtaagtgagctgcgcgcgcaaccgagctgcgcagcccaaaacacatagtaaatacgatatattacaacttgatatctcaacaacagtggctcatagggacttgtctttatagcatagtactatatatatgatatctagtatatctagggaactttaggaaaataaatggctttataactacgatatatatatttctagcttttagggacgtaattttcggtaatatttgaaatcatggtaagatagtattctactctctttgaaattgatatatagtactaagaagtcttatcaataactatcgacaaacggggagataggatgaacatatggttgttaagatataaatgtggaatatcttgcatttactatgtgttttgggctgcgcagctcggttgcgcgcgcagctcgcttaccgaatacgttagttaactaactaactagctcgatcgatgatctatgaccaaagtcaagcaaaacacctatgactgcaacctcctatgccgatgtgaaattgcaatggtgtacttggtgaatattccagcccctgtccaggctcaactgcccccgatgcgttagtgtcgcagtgcttggccatatcaatgtcatatttgtgaagccaggttgaactgagccatggcctttgaatataggaaagctattattgaggaagatagtcttagggggagacattttctgactgaatgcgatatatctgggactttgattttgcgaccttggtgagttgtaatcaaatttcttcgtgatgagataaatatgtggatatgtctcgagtgcacttaaatactaaactatattgggtgaagttatgtgcatggcaatagctttgaggtagagcaagttcattaattctagattttatacaatgaatttctttatgctcacaaatgaaacaaagccgcctcatctacgcctcatctacgtttcattaagtttagtctcagtaactggttttcggttctcgtccacagcgaagatttgcatggactcaattactcatttggtgcaggacagataggtagaatggtgcaataatacggagtagtcatggacctaatggagagtgtgactattgagatcagtagaatgatgttccgccagaatatcaagtggtatacatgtagtttgacagccgggatagacccggggtgacagaagctcgggtgattacactatgtcatgcttagggtgtcactaagctacatctgacacagctccagataccagcacctgcttgtgtcatctaccacactaaaaaggcaaccgccactgcagcccagtgacatttacttcctgccccctattggcgcctaagacaatgtattactagcattgcttccttaactgttacaaaatgtaataaaaaccattcagtataagacacagtatcaaagtccagcaatcgcctcctgccaccgactaggcataacagactagtgatctcgacggcctaaggcctccggatagtcattgcggagtgaagtgactgattccaatttccgaggccacatagtaattagagtatagggggagaggggtaccataggccacgcagtaaacaactctcctccatacattatttatttattttcttcttcccagctcgataaccgcacggcgtctagaaccgtcagaacgctctctttctttggaatctcgataagattgatactgattggtctctcgattgctagcgcgggagcgaatagctccaaaggacgcgagtagccatatctaactatcatgtgctaaccagaattggaaatactaggtatgggatttatttgaggggagacacctcttctacggaaatgacccagatggcaaagggtattcgacctgggcgcaccttgcagaagttatgggcgttctgggaccaccccctttagatatgctgcaacgtggggaacgaagtcatgaattctttactgaagatggtaagcatccttttcttgctcgagacttcgtaaaggcttacgaagatgacgttgcagggaagtggaagcaagatatagagatcccaataggaaccagtttggaaatatcagagcagttcctcgagggaagaaataaggagatgattatggcgttcatgagagacatgcttcagtggagacctgaagataggaagacggcgaaagatctgctccaggatccgtggctgaatgatcggataggatgaagctgtgtgtctgattgccctgtcatagaatgaaaacacgcttccttcgaggagattaatcgcgccgagcactagccgtcttaccgccccataccctttctaggtatacgggtgagacggctatgtgacaatctccaggggctgaggttccaagtgtaggccggatacccgctgtagcgaaatgtcacctcactgccaactgcccccgtggcttaactgctcgtccggtgatgtcggtctgacttcgtgttgcagtagcatctcttctccacctcacgttgtaatttcatgatgtcttcgaaatattgcttgatagccttctttttcagagccacatgattgtattaggagatcgttattcagagacagcagatagcaagttggttaaagggttaggggtacggagcaccccgtatagtgctgtacctagtcacatgattgagggttcgtcgaagttcgaaccttacctacaacatagttagttcaagttcctactccttactccatactccatggtgtattgaatatactgctagtggtctgaagcattaaaatcttaccgatgcacatacctagtattttgaacaccattcgtaactactccataggatctgtatcttgattcaatccatgtcacacgtgccaggcacaatttgaaaatagaaaatagaaaagtagaattgttctcggcccagataggaaaccccgataggaggctgaatgaagacccagtcccgcgggagtggatctgacagtgcagaaaaaaaaaagataaggaacagtgtaaccttgtaattgttcaggtacaatttacatttgaagattaagatcaacacgtaaatatgacctcgatcccctattgaatatctgctcagatatattcccctattcgtagtaaactgtaggtaccgtagatagggccaatactccggcatcggtagtaagccggaacacggcgacagtcaagtcaggaagatccccggaggcatcggggaaacacggaaagcgtaaacgggaccttatctgtcgccaatcgttggctcgttcccatttcgatacgctaacccgcaaagggaaaggcttagcttacggcggagccccacttagcgccagtggcgagttggactttatctgtagccaatcagcgggccgggaatcgatcttcacctatccaattgccggtgggcgataggcatttgggggcatttgggggttctgatatcccgagaacagagaaatccaagataagcgcctgtttcttcgccgaaggtctccagaagccgaagtgcaacggtgttgagtacgcgcaagggtacctgcaggagatgataagctatctggcagtttacttgtatctagttggctatctgatttagaggttctgagtctgaaaaagatatataaagagtcgtccgcatggaatctagttccccgaaactttaggaactattccccggagtcgaactactgcatggtcccattggatcataatgtattgtccaaggtatatccctcacgggccaaagctcgaactattggcaaggcacgatccatactcccttgccacacgatgcggctgtccacgccggggatgacgaggttcctaggtgttctactggttatattgtgtcgttatactatgtgttaattattgtatacagaaatcaaatgaactgagctttgttatgtataccagaccctgacggaacattgaaacgttgaaacacgacagtatctatcgattatcccattgctattgtcacaatctctgaccacaccactgcgaaccatattttgcccagctctcgtccgattttctcctctttaccgcgccttcccacggcaataattgaagtgtttcatgattctattttagctttgttctctattcacttttatcgcgtggaatcgaattgaattgccaattgccgttattcgacggggacccactcgtgtcgatctgacttatcttgggattttgggatttttggttcgacgagttcgggtttccttatttttatatccgtggcgaaattcttctctttttaacttctggaacatccgtctttttcttcctttcgccttcacttcctactttcaccctctctcctacacctaccccatccacatccaaagcttcgagcttctgctacaatggcgttcaacgggaaagccccgtacgccccggactatgcctcctacaactggataggcgccccctccaattacgacctctcgaccaacacagacttgggcggcgattcccgtatgcgtctttcttgtctccaaacggtgtgatggttttaacatgggtcccaactaggcaccgaaaatgtcaacaaatggttccaggccggcgaccaggcctacatcctcgtggcctcggccatggtcatggtcatgatccccggtctcggctttttatactcgggattggctcgccgaaagtctgccctgagtatgatctgggcttgtatggcttcgttctcgatcgtgaccttccaatggtatttctggggttattcgcttgctttctccccgacggcgaccaacggttatatcggcaacctgcgaaacttcggtttaatgaagaccttggctgatcctagtcctggttctccactggttccaaacttactctatgcgttttatcaggtaagatcgaacatagaaccatgaatctggtttttgtttccagccgatgctgatatctactagatgcaattctgcggtgtcactgcagctatcgtcatgggagcggtcgctgaacgcggtcgccttctgcccgccatggtcttcgtcttcatctgggcgactatcgtttactgtccgctagcctgctgggtctggaacgtcaacggctgggcctacaagtacggcgtgatggattacgccggtggtggtcccgtcgaaatcggttccggtttcacagctctggcctactcgatggtcctcggtcgccgacaggaacgcatgatgctcaacttccgcccacacaacgtctccctcatcctcctcggcacagtcttcctctggttcggttggctcgggttcaacggtggatctgcctttggagctaacatgcgcgctaccatggcctcctggaacactaacctgactgccgccttcggtgccatcacctgggtcctgctcgattggcgtctggctcgcaagtggtcaatggtcggctggtgctccggtaccatctcgggactcgtagctgcgacacccgcctccggattcatctcgccctgggctagcgtcatcctcggcattgtcaccggcatcgtgtgcaattactccaccaagatcaagtactggatccgaatcgacgactctatggatgtgttggccgagcacggcatcgcaggaatcgtcggcctgatcttcaacgccttgttcggtgacgacgccatcgccggtctggacggtgtcagcaccggcaccggcgtcggcggctgggtcatccacaactacaagcagctgtacatccagatcgcctacatcgtcgcgaccgcctcgtactccttcgtcatgtccacgatcatcgcctacgccatcaacgccatcccgggcctgaacctgcgcgcctccgaggaagccgagctactcggcatggacgacgaccagctgggcgagttcgcctacgactacgtcgaggtccgccgtgactacctcgcctggaccccacagaaccacgaccagctcgccgacggccacgaggtccccgccgcgcagcgctacggcatcggcgaacacagcgagatgatgctcggtagctcgccgcgcgaggtgatgctcgagggccactcgcctaacgggcagagcagccgcggcggcagcgaaggcgacgtcggcatgcacgaaatcaagatcgcgcctgctcctcgccaggccgccgagcagaatcagaatcagaatcattccgatgctcagggtgaacctgttgtgctaaagccggtgcaagagaagacggagaactaatcagtcttacatttcacttcattctcctttctcccccttcgctttgcccaactcattcatcgtctcttctctcaatctcttttgcatgacatgcatttcgcatacgccatttttcgtttagaaagctttgattttcttcgcattttcgcttctttatctcgatatcccttgagcgtgcttcttttcttgcaaccaaaaagcctggggctttttataccatctcaaacctaccctcgattctctcaatcccgcgaatttccaccgactccacataccatccgacatttctcaccctccgttcttcccatctccacctcaaccctcaaccctctcccgctaccaaatcacatacctcaccaccttttcaatccaaatacaaccttcctgggaaaagcaacttgaattatggtctaatttggcctggcgctccattgttctaagctttttttttttatggcaatgggggatattaaactgggttctgtacggtatacaaactgcttcgttgaatgacaagggaaataataccttgctttctgtccatgttttctggtcttgcccctggaatagagcgagatagcccgatttacatttttattatctaagacttttattcacgacgtttgtataattgtagatagatggtagcttgtaaatattactaccttgcctgttactagtctaaatgcaactgtctaactagaacccgacataactaacacaaaaaataaagaattcaaaatgaaccaacgcaaaaaatgcaattatacaaaacctcttataaacaattaaagaccttcctctccctacctcctaaccatccccctaaccctaatcaaatcctccctcccaagcttctcaacaacctccgccgcaaccccacccctcctcacctcatcccactcatcctcatccatgcccataacaagcgtcatctgcacacagcgcgcaaagcactcgcgataccgatacctccccggcgcaccagccacatacccaacctcaaccgcggcgcccacaagccccgcaacatccctctcgagacgcgccgcgccgagcgcgttaatccgcgatccgtacgaccagagcctcttctccaggagccgggccaggtacgcgagcgtcacgcccaggacgcggtcgaaggcggagggcgtgagaatgcgcgcgaacggcgtgaggaggtcgttccaggcggcggtgaagcgaggcttgacgagttctttgtcgaagggggagtttggattgtcgggttccaggtttgggtttggtgtgtattcgatgtcgcggaaggagtctgcgaggattgggcgtaggcgcggtttgatcgcgttgttgaagattacttgaattccgtcggttaggaggtctgttactttgctttcgaaggttgtggagagggtttggagggtttggaggactttttgagcggtgcttgggctggggaagattgagaggaggtgcggggttgcttgtgtggtggtgtcggtgtcggtcggcttggagcctgtgttgttttgcacgattcggcggatgtagtctactcccaggtcgagattgttcatttgcactaggaaggagatgatggtttgttcggagggtggaccgccatggactgggatgcgtgggtagcactcgtcgcgcatcttacgctgggtcatgccgatgaaatcggaccctaggacgcgtgagagtgtcgggactacgtttgtcacgactgcttcttgggaggtggcgagcgactgctggatgaccttgttgacgatgtacattatgtcgtcgatggccgaggtgatgtgtggtgggtccgctttcagtggacgctgggggttcatcgtgaggcctgatggggactcgtctagctggaaggccttttccacggagcggcggaagaagaaggttgtcattgtgttgaagggggccactaggcgatcattgatcttttgggccagaggtgactctcgcaagaaggtgggaagctcaaatcgcttatcgtcatctggctcatcctccgaagactaaagaagttgttagtgctgatattgaaggggcggagatgtactcacattacatgtatcagccaggaaccgacagtacagtgaccaccgacccagcatgatagccatctcattcaacaccccgtcaatctctttcatatccacaccctcctcgtcggtggcagtgctcgcccccatggcaggggattgtgggcgaggcgggcctgttcgctgcgcggacaggaagctctgcactaagaaagtgaaagcataggatttgatatccatcaattttcgatccacatggcgctcatcgctccatgtatcaagaatgataccaccctgtacatcagcctcgacctgtagccgttcaatgacgcgtcccatcttacgggggccatagtggtgctccacgagcccgccgtggccatcaataatctgcgcaatatgttcaaacagtttggtaagcgcatttgcatagaagaacccgtccttattttgagcattcccggtagccccattgaggttcgcccgagccttggccgcgacaccctggcacacataacgaccataaacatcaagtccaacctcagagcggccaataagcgggaaaagcttgaagaagcgtgtaatcttggctccatcattctccttaaccgccttctcaaactcgcgcaggaacaacccgcacagcgactccgccgcattatccagcgtcacacttggagggtccggcacctcagccgtagggaccatttccgcagcaaacgcgccgttgacaaccgtcgccgggatctgagctgcgcggtgtaggtagctggcggctttctcccagtcctggggcgcacccatcgagcccgccacgcctagcgtacacgccttgagctcggccacctgctcgacaacttccaaggtagctttcacccgagcctgctcgagatccagtcggcggaccgcgctagagatccggtcggcggtgccggcggcttcgaagagcatcccatggctgatggagcgggttgtgctggcgtgggtgccgatgttgacgcgcatcagatccagccggcccagctcacgggagaggtctttctgggatgttactagggcatccaggcgggcagttacagacgcttcttgggtatgcaggtgggacaacgtggctttgatctcggcgacggagctggcgttgaagatgtcgggctgtgcgagaggagatgtctcttttggtgaggcattggtatttggagggcttttgggcatggaattatgcccattggcagttgcagccattctgggcgccattggtcgtcgcaagttggtttgttgatgccacgccagttgtagggggttgcgggcggtgagggcgggttttacagcctcatgattcatgttactgtgctacgtcaagaccggcggggatttatgactccagattgttaaaccaaatagaacttccatacttgcctgaacccctctttctttgtacttcagtcgccgtttcatctgcggcgtcttaatgtggttgtgattcaacgcgacgtcatttccgccccacgctcgcgattatatcagttgctcttttccagtttcctttcctttttttctgtgtaccttctctgttgatcttcttcttattgacaagtctcttggcttgacttacgtctgtcaagtcttcaaccgccatcatcggacgtcccaaacctagacgtcggaatcggcgcaccatgggcaacgaatcgtcaacccaggtggatgagtttgcacgccccttggtgcttgaggggcggaatatcgaggcggtcgccaaatatgttaaacagcacaatgtaaagaaagttgtggtgatggtatgcagcgtgaaccccatagaatactgcatgagagctaacaagcatgcaggtgggagcgggtatcagcacttcagcaggcatcccagactttcgctcacctgacacgggaatctacgccaatctggcaagtctagatctaccagagcccgaggcagtctttgatattggtttcttccggcgtaaccccaagcctttctatgcgttggcacacgagctgtacccgggacgctatcgcccgactgtcgtgcactcattcatcaaactactttacgaaaaggggatgctcctgaaacattttactcaaaacattgactgcctcgagcgcgaggcgggcgtgccaggcgacaagattatcgaggcccatggcagttttgcatcacagcgctgcattgaatgcaaggagacgttcccagacgaggagatgcaccagatggtggccaagagcaatgtaccccactgccacaaatgcaacggtctggtcaagccggacattgtgttcttcggcgaatctctgccttcggaattctttgaaagccgttctctgccagaagaggccgatctctgcattgtcatgggaaccagtctgtctgtccagccatttgccagtctgccttcgatggttagtccaggcgtgcctcgcgtgctcatcaacatggagcgtgtcggtggccttggctcgcggagtgacgatgtgttggtgattggggactgtgatgccggagtgcgcaagtttgcaaaggctctgggatgggcagaggaattggaggcgctgtgggaggaaaccaacccagatccgcagaagagggcggaggagaatgctccgctgcagacccgagacgagcggctgcaggaggaggtggaccgactcacggaggaggttgatcgaactctggggttgacagatgcgtatcagaatagagtacgcgagaagctggagtcacacgacaaggacaaggcacaccgccagtctggaggtctggaccatgttttcccgcatttggcgcgtaagctgtcacattgagattatgattcatgaaatgtctttgataggcagaaataggagattatcatttgagtattatggggtagatctagtgcagtacgtactccgtagttatgtaggacatacggggtagttatgtcgtacataacatggatagccaacgccaagagatgataatatcatcatacgtttgcggtcgagacttgatttcggtcaaataacctggaatgttctaataatctctttatatcagattaacctattttaactatagcctaagatagatctgctataaaagcaattcccccctttgccctaacttcccccaattgattttctcgtttctctccgacagtccaaaacaagacatctacagttgccccacgttatttttccatatcgtcattcttccccctccccaacttttttctttctttcatttctcttcctccataaattcatattcatattcatcatggttggacttggcccaaagcacccgccgtcccgcaagggtgaggcttgaagagctacccctgcctattttaaactaaccatgtggtacagggtccatgcacgagctgccccagaacttgctgggcaccattcaggacctcgagaaggctttcactgtggatcgcgcgaagttgaaggaggtcgtggcacacttcgccaaagagctcgagaaaggtgagcccatgatccgctccctgattctgcgcagtcgctaacaggaaaaaaattaggcttgaccgtcgagggcggcaacattgtgagaacgacatcattcccgatcccaatttagactgaccctagctaatagcccatgaatgtcacctgggtcttggacttccccgatggcaacgagcgaggaacctacctggccctcgatatgggcggcaccaacctacgtgtttgcgaaattaccttgaccgaggagaagggcgctttcgatatcacacaatccaaatataagatgcccgaggagctgcgcactggaaccgccgatgaattgtgggagtacatcgccgactgcttgcagcagttcatcgagtaccaccacgaggaaggaaacctcgccaagctgcccctcggtttcactttctcctaccccgcgactcaggagtacatcgatcacggtgttctgcagcgctggaccaagggcttcgatatcgacggtgtcgagggtcatgatgttgttccccctctggaggagatcttgaagaagcgggtatgttcatgagatgacgataccctccccctccccacgcaggttcaaagactcacaaggctacagggtcttcccatcaaagttgcagcactgattaacgataccaccggtaccctcattgcttcctcctacaccgactccgccatgaggattggctgcatcttcggtaccggcgtgaacgccgcatacatggagaacgcagggtctattcccaagctcgcctacttgaacctacccgccgacatgcccgtggccatcaactgcgaatacggagccttcgacaatgagcacgtggtcctccccctcactaaatatgatgacatcatcgatcgcgattctccccgccccggccagcaagccttcgagaagatgaccgcaggtctgtacctcggcgagatcttccgtctcgtcctaattgacctggttgacaatcaccccggtctgattttcaacggtcaggacgtctccaagctacgcaagccctacctgctcgatgcctccttcctcgcccacatcgaagaggatccctacgagaacctgacggagaccttggatctgttcgaactcaagctgaacatccgccctaccgagccggagttggagctaattcgccgtctcgccgagctgatcggtacccgtgctgctcgtctttccgcctgcggagtcgccgccatttgcactaagaagaagatcgactcctgccacgtcggtgctgacggctccgtcttcaccaagtacccccacttccaggcgcgcggtgcccaggccctgcgtgagatcctcgactgggcccccaacgagaaggacaaggtcgtcatcatggctgccgaggatggctccggtgttggcgctgccctgattgccgctctgacactcaagcgtatcaaggctggcaacctcgttggtgtccgcaacatggatgacatgaagaccctgctttgagtgggtggtcttgtaatgatggtgactatgactatcatttaacccatgacaaaacaaaccctacgtaccgattttggatatcttcttggagttggtttgtgccatttagttcgggggttttatgaaagatttaacgatatatcgattctgtgtatgttagccttagatggctcgtgaatagaacatacatagtgctattattctcgtaactatcactgtagctagtatcattgtaattctcggcttctctactcagcttcacatctcacccaagtcactaacccgaggaacagcaaggcgtagatatcaaagaagatacaatgttcagatataatcaattggcgtataaacactagaacacgacctacctacatacaagtctcacctacataacaatcgagcccatctagagccacacacctaaactcccgaatcgtcttgctcaatatcaaaagcctcatcataagcattccaagaagcacagttatcctcaagagcctggcgatcaatcaacggctcaatttcactctccctctccaaaaactgcaacgcaaaaccctcatccgtatgccagccaatatgacaatgcataagccacgccccgggattatccgtctcaaacgccataagcaaatacccattcccattcaacatcgccgtatcccttcgcggcgggttattagtcgccacactcccatcccacggattcgacccctgcgccagaacaaagaaatcatgcccgtgcatatggatcgggtgcgtgaccgggaaactcgtgttgatcataaggtacacccactcgttcgcccgcggcagctcaatcacaccgctcgactcggtgaagttgggtgtgttttcgttattgaaaagctgcagtaaggtcgggtcttcccagaggacttgcatcgtcgtgctgttgagataccagcggaagaggttcgcggtgttgcgtcccagtgtcacgtctgttaggttgttccagtctgcggcggagacggtcttggggacttgtgggattagactggaggctggctcgtcgatgcattcgtcggggaaggtgtagggccttgttgtgggcgtgtttggactgttgccgtagtagaggatgcctcttatgttgtctgggtttgcgttttcggagcatgcttcttggggaattgcacggatccagaatgagtcggagatttggcgtttgttggctgttacaattacatcgtagcgttggcctgtgtgtttttttgttagttcatgtttcttttcatttggagggatggagctggggcttgcacatacccattccgatattgatataatccgtcgtaaacggcttgatcggcacaaagtccgccgcaataacagtaagcgtatggttatcaatcataaacttccagtgcgtatcaacagccgaattaacaatcctcagccggtacgaagacccctggttgaccttcatctggaaccgcgtgcccgtagaattggtcccattaccaaagacattcgtcccgttaatcaagccagtatccaaagtcggtggccctatcgtctgagcctccaggtacagctcatcaacagtagggtgcgaccagtccgtcaggaacagactgcccttatcgacctggtagttcgccgtagcagggccattgatcacaatcccgccaaacacgccctcccatgcctgcaggccaatgtgcgaatggtaccacgatgagccgtactgcgtggcccgccatttatatgttatggttgagcctggcgcggtgggacattgcgtgatggagaccacaccgtcgttgccgttcgtgtagttctgtctgatcccgtgccagtggatgctcgtgccgttcttggcattgtgtaggctgttcgtgacgtggatcacgacctcatcgccccagtctgcgaagatcgttggacccgggatagtcccgttcacggccattactggccggctgaacccgtctggtgctgctactagctcttcgacgtcgagccagtactcctgggttacgccggtgttgggtactatctgggtgtagtcggtgttgatgtcgtattggcaccatctggaccgtgttaggggcgtgttgcccacacagggtgttcctgttggcttggtgatcttggtggttgtcgtgggtctgtggttttgtagctggacattcacagagctagctgcgttctgtggaatggccacgacagaagcgctcaggctgaatgccaggaggagaaaagcttggaggttcatagctgctgattttacccacgtagggcacttatataatgctcaattgtctttgggtcacgaatacagctctatatagagcttgcaacacacccaaaaaagacttcgagtagaagaaaatgaatgggacttgctgatacacaaccaagagaatgatctcctatttaagccgctatcttagaagtatatcacactacgaggttgttagactaagaccgaaaattccatgtctcttttcacgaggtgacctgcatactcctcactaggatatgccaggcagccctaccggcggcgatgccgtgtaaatggatcttgtgatacacaagacgacccgacagacgaataccggcgaagcatcagagtcatagtccagctcggaagttgaggctatgtgctcagtggatacctgaatagcaagagaaaggcgccccgtatccacgccaaagacagtccaccattcaaacgtaagaagatgttcaactcggggaccttcccagattctgagtgtctatcacaccacgtgcgcactggccgctttgatattgggggtgtttgatagtgccctttctctcgtaatagtacccttgagatgatggatatcccatgtaactagggctgtgtcttagattaacaaagtcaaatcttgcaaagagaaccaatgatggaggtcggtcatcgatgatattattctctagttcgatcgcagtcagattggcatgcagggccttgcattagggttatgctccccgacacgcggtcctgtttgatcccggtgtaacctgtttcagccttagtctatacgagtgtaagcatcccacgtgtgtggcttggacattaatgttgtgatctcgcatattggatgtttctttttttgagatatcagctggtttgtccaggattgtcgattgttgcgagaatcttgacgcagaatgcatgcgagtggatcgtcgatctggttgtaacagccgggatctgaatttcagcatggaacgcagcctgatgatggcaaagggggtgtttctggtttactgggatcctgcgatcgagttgcaaattacgtatcgtcagctcataccggttcaaatcacaataggaggcttggatcacactctttgaaaatagagagaagatcagcggttgagactatagagatcattggttagttcctagggtgctgcctgcttctaatcacattgttgtctcgttgaatatgccctcctgaatctgtcctgttttataagttttgcttgatcctgacacccttccaacatattgtatgacttgttcattgcaagatgctatttctttctattctcccccttctagcctttgggctagtctgctttgcgcatccacttgaaaagcgacagtcaacctcaaccgattccttcaagctgtatgcctatggcactggcattagcggactgcccgtcttctacaggaatggtatctcagccctcccagctctcaagaaaagcagtattgactgatacatatcaccttgaccacaggtactgcccaagttgcagatgtgtccaaagtagacacaaccacaatggccgcaatgaccccaatcaactgtaagaacccaagatctccacttgataccatgtgagaaccactggaattacatctaaccacgtacacgtaacagtcaccgccgccactgacaacacctgggttgcacaccccatttccagctccagtgccacggcggacttcaccaccctctctaccgataccaacatgctgtgtctagaccaaggcgatacagcggactccaacccagttggattcactggtgcatccgcggcggaccagtcgaccacaaccaagctcagtaatgtgtggtccacatatgggggctacgtcctagtcaccgtgagcggggccaacttctacgcgagacaggctgacacagacggcgtgtactctctgctttggagtagctcggctgaggcgatgactgatactataccgcttgtgctgcggactactgagcccgcgacggtatctgtattgacttagctgagcagggttgggtaggggtttggtggagttgaggggtctcgttacatagcagcaagcggtatggtgtgtggtgttgtaaggaatcgatctcggctctgcctactcggggactttgttggatacgatgttatgcagctagtaatgtgctattgtgtatcatctatttgtgttgtgttggctgcattgtgagggaggaagggggttagctagcgcttactatattatgtatggcatataggctgcattcggttccggaacatgagagtcccgtattctgtaaagtatccgatatatcaagtgtacgatcaagtgtacgggcgactaacaagtacgtagatctaatgatagagttagttatgaatcggtggcatagttagtcggctgcacaaatggagatatataactatcccgggatgtgtggtcagagcatgccagtcttgaaatcgaaaaacaatgagagccgaatgaattgacctctacagacaagtaaaactagcaaacataccaaaaaacatagattcaggaaattgctacataacctatagctgatatatgcatgagggaacgacgcggattgtctcagacaaacgagaggaatactatacgagacttattgcagaaaacgcctcgttgctgtgcgcagccaagggagagagaaagcccaacagaggattatcaagcaaagtgttggttgtgaagaggccccggcattaaaacaaagaatccagagggaataaaatggaataaagaaaaaaccctcgggggcaaagttgaaatcagacctagaaaagcaaggtaaggcagactggcaaataaaaagaacccgatgcaagcgacatttgatatcaaaagcccaaaaacaaaactccccagttctcctagacccagaaaacaccagaaataaaatgaaaacgtggtttagaaagaaaaaacaccggattcccatcccaaacccttggtaaattgacatcccgaataacaaagaaaaaaaaaagcagaacccattctacatctgccatctgtaccaaaccttctgcgagactaaacccttgttgatcgtttccgcagaccaaattcttgttcctggagctctcgtatcaaacgaagactttcttcgtctgcatcctcgtctccagtgatatgctgagtatgcctgtgctgacgcggagagagtgacgtagggccttgacgatggaagtgcttttcatacatcggagagctcttcttcgcgtgtgaagaagagggacgtgatgaaggctttcttgtcgacgctggaacaggagtggtcttgcgggccccgatggtcgaagacgtggctcgtgctgcttgtttcggagcccgggctgtatttgcatcgggcgcgaaccgatcgacgtgtcgaggttggcgagacgagtgtcgagagctagagttgggtgtgtggagagcagttgacacttccccttcaacagactgcacggcatctccctcttgaaccccatccatctcgtcgaccagcgacgtgggcggtgacaccaaagaggtgtttggcttggatgaagacacagacatagaatttaagtcctttgcttccacaggctcggcctggaaagcaggtggtgatgcgtataaagcttgattttgaggtgcctcggccgccttaggcagatgcttatcaatttgattgaaaggctcgtggtcataggtatccatcaggtcgccttgcaccatcatttcgtctccatcatgatcaaagaatactgcaggctgtgtcatgggcgatgtgctctcctgcttcgcctttttggctgaggcgggcatgtcaccctcttcagcagggcgtgctcgtttggcggaagcattcgcacgaggtttagaacgctcttgggccttgatcggatctatccgaccgtactcatcgtggatgcaacggcgctagtattgggttagtaaaagataaaaggagtaaaagaagtatcaaggggtacgacaaaccttgctcttccgacaatcatcgcacgccttgctgcgtccctttttccctccgttggttccgtcggggctcacatcaatgagacgattggcggctatcgtggagttgcccatgaccgcggattggaatctggccgagctctcgaatcgttccaggtcaacaagatgcccattgttctgaaactccgtttgtgacgcaatcgctgccaaagaattcaaagcagatacagcatcctgggccaatgacgatggcgtgctcactccagagccggctgtgaatgtattggttgcgacttgcccgttgagcaccagatcaccgggttcatctttgtgtcggcatcgaatgcgtcgcttgcgacaggcgtcacatgcaactcgcttgggaccaagacctgaggctcgttgtacggctcggggcttgggtgtagcaatatctttaatgctcgtttccaaaacaacactgaatggcgccggcgttgcacttccatcagactgcgcataagcaaggctgctggctgggggattgggagttgcaggggcctcttctgaaggccactggacagcttgtctttcggcatatgtgcgttggttatcgacattgcgttcggatcggcggctgggtcgtcctgcgggcttcttgtctgcaatagaaaccttgggattgctttcgatgacgccgggtcgagtccagaggggtgccttttcgttaccacgtttccaggcgacccaaattccgaattttctgatcatatccacgggatctcccgtacctttggggatagagcgtttgaccgcgtttcgaatgtccacggagaggactccatcgacagtatagccacccgcaatgagtgcagtccgaagcaaatacttagttaactcaagtaagccctccagttccgcctgtgagtaaaaacgtgcattgtgatggggagaacctggaggttcctggttggcgcgttcgccaaactcgtaataaattgggtattgacggtggaaccgatagttctcatcctgcatgaatgcttccatcacattctgcgggacggggtcatcctccaggtatttttgagccgtataccactggatcttttggaagaaagggtaacggaacttcttgggaactttggtctctttctcgatgttgagaatcttgatttgcatcccgtagttcaacttggtcaagaagttgccgccaataaccaaactgttttccggggtccagactgcgtgaatccaaccggacgggatcaacatggtgtctccctcggagagatccacacggtagcactccttggtctggtttccaaggaaaatcgagtcctgggcaggagagttgcaccactcctcgtacttcttgaggtgtttgtctttgggaggaataaagaagaaagtcttcttgcccttcaggatatggtagtacactgaagatcccccaaagtcgatgtgaaagtcggtatagcaatcggcaacagacatcaggcagtagaactgaactttgggatattcgccaattgccttcagttcctctggccacacggcatcttgcagatccaagtcacgcacaaccttcggtcgccggataagtctgccaagtttgctctgcgatacctccagactgataacattcctgacaggcttgtccgactcattactttcgtaataatcggcccatttctgcatgttccacctcttgtcctctccttgctgagacttgacatcgatcacttcaaccctttcttcgggtccgtaaagctctgccacagcacggacagtgagacccttcggaatgaccatacctaagaggtcttgaccacaatcgactgtttcttcaatatgactcgcttgttctgggtggttctcgagaagatcatcaaacatctcttgagaacaagcctcttgtaccaaagactcgaactctggattctccgaggaaataggttcggaagagttccagcaggcaggtatcacaataggctccgtccacccgttacctcgctcgaagtattccgctgtgaccagctcaggtttcattcggggaaaattctcaggttgaaatcggatctttccttgccgaataggctcgagatagtgatgttccaacgagtcagtagcagctttgactagaccttgattcaggcctgcgtagtcaatagctgtccgggcccgcgaggacttgcgcacaaaagttgtttggccatgaactgatcgacaatgccgacaaataaacttgtcgactgtgcgaacctcacgatcattcttgaagccggcgcaaacgatgtggaaccagtgtttgcatccatcgcaactgatccacgtgtcttcgtcctgttcctcggtctcaactgggatgcgcactagatgacatgccccacatcttgcttgactggtatcaccctcttcctcttccacttttggtggaatggatagggtcttcggcgggaattgaggttcttgaagatcggccggaggatggatcccataaggagtagggtgaggcgtatcgattggggaatgccaggctttgccctcctgttcatcctcccagacaattggcggaaaattgccagagctagtggttgggcgaattccacggatcgcaggacgggatatgaaggctgacccgtcagaccgagagcgcatgcgggcatgaggaatatcctcagaattgtgatccatcttggaattgctctggtccacatgtccaacagcagcaaacccaactcgagattgacgaattgcgtcgcctgtgtagtggtggtaggtctcgtcgatgctgactcgtttagtgtggttgccggggcggaaattagtaggccgcgcgagattgagtaagagctctgcatcggttgtcatgctttccactccagctgaatgtgggttttctgccagcatccctagctgcgggtgatagggcgacggattcctcaccgaccgtgcccgcttcgccggtcgttcagactctgcggggtcgggtggaaataagggaatcgccgactgaagggttggggaaggcgggttgggagggagtgatgtgaaggtaggactcgtcgcgagggcgatcgtcgcaagtgtgtcgatagtcgagcttgagcggccatggcctgaccgctggtgtgaaacaccttctgcggcgacatgtcgatcgtgattagaagaaagctgatcgcgatcaagactggcagctcgagcagggccgcggctgccccaagaggagtgaaaatcggtcgttgtggatggagtgataggctcgacagcgcgtaaaggaggggacggagtacggtattgcggcgggcggccgccgctgggggttgcgggtgnnnnnnnnnnnnnnnnnnnnnnnnnnnnnnnnnnnnnnnnnnnnnnnnnnnnnnnnnnnnnnnnnnnnnnnnnnnnnnnnnnnnnnnnnnnnnnnnnnnnnnnnnnnnnnnnnnnnnnnnnnnnnnnnnnnnnnnnnnnnnnnnnnnnnnnnnnnnnnnnnnnnnnnnnnnnnnnnnnnnnnnnnnnnnnnnnnnnnnnnnggggggggggcggccgccgatgggattcgcgaatgatgccgcgctcatcattttcgcaacccggtgagagtgtagattaaagaaatttaaagatgaagggagtggtgaaaagatgcgctgcggtaggtgggtgcaaagcggggatactggaccacacgggctagcgagaggccggcgcaggcgaatggaatgtcattcctggcaggaaagcatgcgcaaaacggaccgcaagtatatgattgatgtttgatgaatgattgagggagaatcaggtggtcgacggtggtcgcggagcgttgagggggttcgaatcgagcggcgggaggacaaaggcgccgagagtcgcgccgcaacctgcgggcaggtagggaagggagtcgaatgaggtccagtggccaggaatcgtttcctgccaaccggatgggaagttataattatgcgaatggatgaagcgccgagagcgagagagaagcggatgagcgcgaggtgttgaggcaaaggaggaagcgggagtcgagcagtacttggaggtatgtatacggtacagctgcggtctcctacattacgttgtctcctgccatcacatttactagaaaagattgatcttgcatatatataatatcaagatcaagaaacgctcattacaacatgcgattgtgtctacttggttgattccccccgttgctcctttctctgtagtccaaatgaagttggcgacgccgagagcgtccgtcttgataatacagtttcataccatcacgataccgtcacgtggtaagtatgggtagatcaccgcactcattgcggtcacatgacccggtcacatacggttcaagaaccaactgccactagaccaggataagtaagcgcaccgccaagccaaacctcgtggttgtccttgcgacttgctcggatcttctgtctcttcgctattccaacactgcaactgataccttgcgtatcttcttgtcaacactttcattcgacatcttctaggactttctcgtctctgagaatgagccgaaagctcgcccccgaagccaatcggtacgtgagaattactttttccatgcccctcccggattctcagcacaagtgccatttcgccatcaacagcttgatcgttgggtcgagcagatccctgacatttggaagtgactcgcgctaacctcttttttctcttttttacaggattctcttcgtcaagaacctcaagtatgtacctgatcattccgctgcttggctccggctcgattctccggcagatcagccgtgcagctccccatttacaatcgcgatcagatcgctgacatctttctcaaaagctacaacgtaacggcagagcaacttttcgacctgtttggcaaatttggtcccattcggtaatgtcacccatggtcgcgtgcgtttgaacccgatctaataccatttcatctacagtcaaattcgccagggtatcgccaataactccaagggaaccgcatttgttgtctacgaagacgtccatgacgcaaagcaggcatgcgataaactaaatggcttcaatttccaaaacagatatttggtcggtacgtgttgcatatggatctaatgagcgtccagaattattggaagatgactaactttggatgttatagtcctctatcaccagccagagaagatggtgcggacgaaagaggatattacggaaagacaagagaacttagagaggctgaaacaacaacatgggatagaatgatgtgacgaattctttttctcttccctctgcaagcatttagctgcgcgtggtattgccatgcctttactattcaatcgcggcttggttgaggggtttccggcgtttttattccctgggtttttttcttcttctttcagagggtttgatggtgggcgaggctggttctggtcgtcatatattgacccagatatgatcgtgcgaacagcacgccggcgagatctgatttcttcttatgtttattctattcaaccattactactattaccccctttgtcaattcgaccctccaatttgctccaccattgtctatgctatggctagatgctaggtgaaagggttttttgcgaatgctatattactggaagtgatgaattatacgagtgtagagctgttttcgagcttcgttggatctcagaatgtcaagctaagggtctgtctacctaagggtgccacatcactgctcagtacccactattctgcaggggtatttgaagcttggcatcgacttaagacatatacaaaccataccaagatcaagatcaaagcagatagcgaaataaagagatgccaagaccaaagacccttaaaatagccgtattgccatgcagaccctgaaagggaagtgctatcttgtcgatcccgcggggaccctgacaccgcctaggggcagtctcacttgaccctgatcctttttgttcttttccagaacctctttttttctacactcctcacaaagaactggtttttataagttcaggcttatttctactcatccgctgacccgatttattgccactcatttcgatgtcacgcatatgacgtccggctatctccgcctctgacaaaccttccaaggttactaagtgcttcctacgatctggtttccagcatatgtcgcgttccatctgaaatttctcactgttcttctggttttcccagactgaaaaaggatggacggtacgaccggctcgttggcttcgatagctacaaccacgcttattgctgctagctccctagccattccaacaccctcgggtgcacacacactatattatgatgcaacgaattcttcaagcccaggccaggatcctaatggcgaaggaggagaatgcaagctacttggtcccttctctgtgtttgttcagattgctcttggcagcctcgcattattatctctagtctataagagatggagagaacgaccgcagcgcccggtgaagatatgggcctttgacgtctcaaagcaagtcttcggatcggtgatgcttcacatgttaaacctggtcatgtcgttgttttcggcaggccaactggagattcgaagctcatacaagccgaacccatgctcattttacttactgaacctgggaatcgacgtgcgttccttctgatcttgttttgacttcttttgaggagctgctggctaactgatagacagactacactcggtatccccattctgatcctccttctccacgttctcaatcgcttggcatcctacacacctcttgcaaaccccccagaatctatagagtcaggaaattatggccagcctccacgcataacatggtggctcaaacaggccatcgtttacttcatgggattactcggcatgaagatatgcgtgttcttcctcatcgagctcttgcctttcatcgtcactatcggcgactgggctctaaggtggacagaaggccacgctgctgtccagatcttcttcgtcatgctgcttttcccagtcatcatgaacgccatacagtattatatcatcgatatattcatcaagaaaccagtgtcacaatacgtggtggatgacacagttggagattttaccatagatgatgatgctcatcgccgggaggctcttcttgctggccaggatgagtcggattcagctgattcggatgatgaagaagctgggaaatctccgagaacaacctcgcagccgaaggctactgcagacgctctccagggagaacgtttacttcccgaggatgacaatcctgttcctccatatgaacctccgagctcgagtggcagtggcgaggaacgttacctgaaagctagttcaacacagcactgaatgttgctttgcgttcttgctttggaagtttcatatttgctttgttttggtgttcatggttatctttaacgtgtatacgattacttcgttcttgcatattagtatgatttttctcattttcctgctatctaatgtgcatatatctaggttgtgcctaggtgtacttggataacatggaactgttactcgtattcctcgttatagtcagaatcaacctatccagagcgacattgaactacatggaatatctcttattctatctacttgcctatcttcccccttctatgttagcctttttactctcatcaagttcatttaactagaggactcaaggatgtcaaatgagtctatagctgtgcatggcctcggattctggtttgttgccgcaaaattaaggcaacagtatatgccgccttccacaccgctttgatctgcccattctggaaaaatcaaagaagaaaaatattcaagctccgcctgaggaagatttgcagcctacaattgcattattgcattcgagtataaattcggtgaccgagtctgcaagaagttgtgcttgattggcagatatcctcacaccaattaccatgcctaacgtagggctaaaaggaaagtccaagcggacgaccaccgggtctccgttcgagaacactacggccaatatccgcccggaggactcagatgtcgagatgggcgacgaaacgagctcagatgaggacgatgtgcccgagaaagatgaggcagagaagaagctagagcgtctgctttttggcgacgatgaggggttcatgggcgcattgaagagccagcaggaccgcgaggccggtatggctctcacactgcacagtgatgatgagagcgatgctagcgaagacggggaggaaggcgagggccgggatttggctgctctggccgactcagacgtatgcgactccaccccaatgcgttcgcagatcgagggcttttgatctaacaattctgctttcatctagcttttcttccttgactccggtgcaccccctaccacagatttcatcggatcaccggaaaccccgtcggacgccgaggacgacgaagaagaggacgaacccgcggtctggtacgacagcgatgacgagcgcctcgccgtgtcgctagcaagccaagccaggctgcgcaaactgcgcaacaccgaagccgaagatgtagtcaacggcaaggaatacgcccgacgactgcgaagacagttcacacgcctgcatcctacaccagagtgggcgacgccggagctcaagcgccgcaagacggactcggacgcagacagcgaggaggaaatcaactcggacgacgagaacgagaacctctctgtgcagcctctagccaagctcctccaaaacgcctccgacctgacgcgcatagaagacaatgcgcgcggcggaaagcgcaagctgcgccaggaagtcatcgacatccagagactaaaggacatcggcaaatcccaaccctcctccgtcgactccctgtccttccacccgcactacccactcctgctctcctccggaccagcctccaccctcttcctgcaccacatttctccctccgcacccgcgcccaaccccctcctcacctccctccacatcaagcacacacccatccacacgtccgccttcgccgcacccacaggcaacaaaatcttcgcctccggccgccggcgctatttccacatctgggacctggacacgggcaaagtcgacaaagtcaacggctcctccgaccgcaaggaagagcaaaagtccatggagcgcttcaagctctccccgtgtggccgcttcgtcggcctagtcggcacagcccgcaagggcggcggtctgatcaacgtgctagacgccaacaccgcgcagtggatcgcccaggtgcgcgtcgacggccgcggcggcgtcgcagacttcgcctggtggtccgacggcgagggcatgaccgtcgtgtcgaagaacggtgaggtctctgagtgggacggacgtgtcggccgtgtcgtggcgcgctgggtcgatgccggtgcagtcggcacgacggttctcagccttggtggtcgctcgggccggacgcagctgggtggtgatcggtgggtggcgattggttcttcgagcggtattgtcaacgtgtatgatcgtcgcgaatgggcggctgcgtatgcgaaggcttcggctgctgagaaggattccaccgctcaggctggtatcccgcgtaaccctgacccggtgcgtgtgcttgatcagctcactacacccattagccatttggtgtttgcgcctgatgggcagatgatggttatggcgagtcggtggaagcgtgatgctttgcgtcttggtatgttttctggctctgcttgtgggttgtgttttgtgtgttcttgctaaccttgtttcttttatagttcaccttcctacctgcacggtataccgtaactggcctacttccaatacgccattgggtcgcatttcctcggtggctatttcaccgaactcggagcagttggctgttggtaatgagcaaggtggcattcggctttgggagattcggggatagagggcccgtctgaataaaatatttatgttttcttgtcatatatttactaccccgatagtggcacatgcttttcgttttgttgtatagtcgccggtaaatcgacgtggtctccgggtataaagttagggctaagtccatgacctaaatccaaggcatccatccaatgactgattctacttctgttcacgggcgcatgattaaaaggaagctaaggtaatacctcagggtttgacaaagtatgcgcgcaatattactttcgtagtagaccattcattttttaaagtcatagctgtctagcgagaaacaaaaacgcagaacgcccagtatccaaagagtagagtaggaattaagccattatacacgccatagcacatgcaagccgtgtcaaattaaatgaagggtcatggtctcattcgtgcgaatgagggagggatctatactgttggccttggacaaggattttcagtaacaaaagggtatctgggggaaacattcaagggaaaaaaagaggaaggaaaaaagtaaatagttagcaagacatccccggggtgcttggctaaatttaggctgggtataaattggatctttcgaagattccgacggggaaagagggggcatgggcagataattcgtaaccgtgatcgatgagggcttgaatggatgccacgaaaggctactctcccggtctgcttgcgccccaccgcttgggtcgcttgccttgctcgacatagttcttgacgacacagggggaacgatcgggtccttgacacaccttgtgacggttgaggtgtttgaacttcgggccaataggtccgttcacgaaatggtattggcctgcaaatcgatactgacggggatcacttagtgggtagaacttgtcaccccagtggcccctgtaatggaaccattccgttggcgcagagggggtgaatgtggacgcccgcaaatgttcgttgtcaaagtcatatgtgtaggcttgcgagttgaggagaggatcccatagtggaccgcgatcagttacatcgtgcagcattccccagggaagaaggtaatcgtgcactccggccgtggcatacatggcatgactgccctcggcagagtagatgacgggctggcaaggtatattagtaaggttatccttgccgcttgtgtaattgggaactcactcgttgtccgatcttctcaacggcttcgtagctataagcctctccgccctggtgggcgctgaagaagagcgctttcgggttgccattgtggaatcgcaccagacaatgctcccagtcgccaacgtgattgccaaaccggacgttggcgacagtgttaccgaggttgaagctataaaagtagaaccagaacgcatcgacaattccgttgcccttgtccatcaccaccaggattgcaggggcatcgcttcgaccaccggcagcatcctggtggatctcctctccaccgtaacgtcgtcggatctcttctctgagtatttcctgagcttcagaatgttcgtcggcgtccgattcggcagcttcttgttgcaattggtaataatcataccacttggcgcgatcttcctccgtgtcgccagggatatcaccgtcgactcgaccatcccaatcagcccaggattcttctttatcgtccccatctgcttgcgggatattcttatcgccttccagccagtgtggacgcgtctgcgcatcgtcattgctcgtcaaaaaaacgtgccgtgggccccactggttcaactcatccagatcggccagcgtcggatggtcccattgggcttgaatcggggtgtaattcagggtcggagtggtgtggtacaagtgctctgcgatatcccccggccagaattgctcaccggaataaaggtgaacgagtggggcatagtggaaaacgtagtccgggatctgccgccgagcccgctcctcggcatcccactcggagtcactagcgccgctaagccagaaagaccgccatggtgcctctggctcggcatcttgcgctttcacccactgcgccggatcgcgatgtccaaatgcgccgtgaacggtttgtatatgggcggcgccgcagacgcccagccaccggcaggatttgcggtcgaaccacgagcgcgagctcgcaatccagctccgctcctcctcgtcctcggtagaccagacaaaagcgcccggccggaggatgtgtattaagctgttgatagacacatacgctatcagagtcgagagcacgccaatggttgccttggccttccgggtcatctgctggagcgagtcgacatagactgtcaaagtagaagaactatgtggggtatgttcatagactgcgagttcgggaattccagtcgaggctagcggttcaatgcagtgggattcaagtgatagggctgcagcgggtgggcattccccagggactatagtgggacgagagataacaaaagttgagacaaggagggcgcacaacagggccgtggggatacctatataaaaacacacggtccctttgttagcgagcccgagaatttcccgactaagaagacaagaaggtaaaggaagaaaaatggcataggatgatccaatatcgcgagctagtcagaccgggaacctgcggaaatgggtcgaaatcatagccaagccggatgccatataccgagtacatgagcttatccgtcgaaagccggagcggaagggacgggaacttacgaagaaatgatcccattgctcccaagcgtgcagagtggaaaacgtggaagttgtttaagttgattaaaaggcgttgcggtgagatgtgggctttttcataaggctgaagccaaaggtctgggcacaactctcctcccagataagactgtataatgatcctggatacacagccctaatgtgacccttcataatgcattgtgctcgagaataaaatgactcaattgtccacgaaatcccctccatctgaaacatgaaaacataaaaatatgcgcatgttcaggccgttttcgccaccaggtcccataatattctgttgatttcgtcccaatcgggcaggagggggaaaaccttggagggttcaccgcttgcagaaaaagctgactcagattctatcttatctccacttgacagaccaccgggcgcatccagaccttccaattcgtcattgatttgtcgatatacaatggtggactccgaatccgatggagaatacgagtatgaatatggcacggagacggaagtgagaatcatgagcccggtctgctctcaatggtactaatcatttgacagagcttttatctcaacctagacctgaccgcccaccatggtccagtgcgccctccacgccgtcgcgcaaaggatacagggtccctggaggatagccaaaaccctgcagaggacatgagccaagcctttccgagcgaagcttatcatccgatcgagagcgccgagacaggcagtctcccgaacgagcggatccaaattctcgacctccacacgagcaacccgatcatttcatactacaatcaaatgttcagttgctcctgggctgatcaaatcggcactgagctagtttttgtccgtccgggcacggagacagacaaccacttccctcaaccgctacaccgtggagccaactacgagcttgtagccgccaacagcgtgaagatccttggccggaaggcacagctcgtccccagtgctgggccaggaccagttcaaggctctactgaggggccctcaagcacaggacctaccgcggagtccgcgtcttctcagggcgctgaacccctcggcgtcccccgtcgccccgcagcgccatctcaccaggcgcagtttctccacaggttgcagcagatcaaatctgccaagggagaaaccgataccgttcgcacggtcatgagtacacgtcggaatgtgaatatgacggatagacagcaagggtgggcccggaccgaggcgcaacttgccgaaatcgagcggctcaacgaacgggctttgagaggagacttggaggccaaggcgactctcgagctgctgattcaagagctcaatcctgacgaggtcgaggcagagtctgagtccgactcggacttgacgtctgacagcgatgagcttacttcatgaattgcaaatcgacaatgtgctgatattgggtctagctgtgtctgtgaatcatccggagcctgaacagctacctgatgtcggtatctcagtggacctacgttgtagtacatagccgaattgtcccgccggaaaccgcggaatagcgccagcgaggagatattgatctcctcgcgggaagcaaaaaccctactcccgtgatggagacacagctgaccctcttctctgtgatatcggaggaatggcatcacaacggtcaacccgggacatcctagcaaagccatcaccggtgacaagccccacccagctcgaccgagcaaacagcccatcggtggagccatctcagctacgctaaaataggtggatctactccgtagagcagtaacgtcattcacaaacttaatgtaggaatgacatcccttgttccatttaaaattactgatcacgcaaaccatctgtgaacgataaacaatgatagaaacatagattgcgcgaaccaattgtatcctgtatctgccccgttcgacatctagaacatgtgcatagagcacagagcaggttgtgcgactccattaacttccacaatgctagactggtgacgtcgtgatcggcatgatcttcacatgcacaagtagatgggccgttactcgcatcggacgacaggttcctagctgtgtatcttgtatcatgtacaacatagtggctactccccatcgccggcgcacggaactactgttctagacaccttctccgactttccgaggtaaagtgcgattaccggacagcctaggttagattttagaagaattaactagttagaaaaagcttagttgtaatgaaggaattatgttgcaatgaagctagtgtctacaaagcaaatgtatacactggacaatatataatagtaagaaaagatgtcgagtacatatccatattaagggtatacaggcacataatgaaataagaaaatacccaattgatttctgattcggaaagcccagggaaaaaaaaaacaattataacaccaattccccagacttttgaaaagcgctccaatgcgcaaaaccagaaccagataataaatgcccgccaataaacacgctaaatccaagaggcgacatgtaaaaagaaagacaaagacaaagacccaaagagaaagacataaggctaataagcatcgcggatatgaagtcgaagaacgagtagtaaaaaggaaaaaggaaagaaagagaacaacggacaggacggggcgaatctgcccaacagtgccatgcacgcaagaccattatcgggaatattagatgatggtacaatgatttctcctgagaaggtcgagaaggaagaagaagatgtatcgaagaaagatgaaagatgaaggatggtatgatcgaaagccgaaaccgagaaaggagaaaaaggtgaaatcactccaggtttaggctggggatatcattgtaggaagccgtgcccttggagaaggcgacgggcgatgggggaggcgcggggggcatgccgtcgatgaggatcgagcgggtcttctctgccctttgggttgaggctgtcatgatggcgcgggagatgtcttgagacatggagaaggaaggtggcatgaccggagtggcggatttggttgcgacggaggccattgttgtggatgtatagggtttggtttgttttggtgtagagagatgatttagacttgaggttcaagtgttttaggtagggtgaagatggactgttcgtttcggtttacacttgggaaagtatggggtagccagataagcaatgtagatgggctgaggttcgagagtaaatgtcagcttctgttgcagagtgcttgtgctttgtaggctatagatggactttgcggctccgatgttgcccgagtccggccccggtcccgggggatcgggtgtgatgtggcaagaagtgacgggagttaaacttacaaggagaaaaggaatcgggttcggctatttgcgagatgtaatagtaacagtaagagtagaagtggtgaggtggtggttgagattatagatttcttggagatgtgaagaggctgaacttgagtattgcaggtatagtatgctccgtagaagactcgaagacaataagagcgaaggtgatagcaaagctgttgacagtgctgggtataataatcgtaaaggtgagtgagcagagaaaaggagcaagacgatttcagggtcaaggagtcgtttatatttttccccttctcattaaaaaataatataaaaaaagaaatgagacacccaaaacagacatccccgtaaagtgtggaggagtacattccctggggaagcacgaaagtacccagtacatacacgcatacctggccaggcctgatgcttactccctagagatctgccatgtcgattcgcctcattctaaacagcccaataacccagttatcgaggtagggggacattcatcggaataacgggagccaaacccggaaacaagaaaaaacaaaggagataggcctgacgcgttagtgtggggaagaaactaggggatgagaatcgatgaatcaaccatttgatacctggttatttcatatgtatgtcctctgtatgtattgcgttattgacattgtccattgtctggtgggaactactccgtagcgaaagccggttgaaccggttgaaccggcaaagctctttacagaactaaaaactagtgctacttaagcgttgttttctatgattctagcactccgtacaccttctagcgttgcccggagaaaactcgctttcagacctcggcacgagagcggagacgacgatcctttcgagaacaaataccgtggcccagcgaccagattgccggggttatggaagggggtttccccgttgcggtgtaggagatcggctccagggtggcgacaggaatcggagctattatttaatagacctgcaatatccatggatgtatacatccggggaaaaggtgtgatcggatatgtatggagttcaacaactgattttcaccgtctattggaaatacgccaatcaggatttttgttctattttgacgtgctcatcaattcccaaggtgcattgtcaatcaggatgatccttcaaaaattgagacgttgagctggatatgataaaaggggctcaagtaccggtatacccacctatagtttaactccacatccgtctgataaaacaacacttgtatggaatagtatattgtacagcgccacagatagacctgtaatagtttgggagtatacttcgctaggggccgaaacgtctggggcacagatcaaggttgtttgagatgtgttgattttgacgtacggagtactccgtactccgttctccgatgccaaaggcttcagcaattcctgattcacagccaccttggtaaattcaggggcataaacgttgagctgcaaaagtaccaaaatccctttgacccgttctaccgccgatcgacgcgaataggggactccacaattcttcttccccggattcaaggggcgagtacggagtacggagtacatacggagtagtgactatttaatatgcactccactgccacatattctcacaatgtgacgttatctgggcaaggaagagtgttactctcagtcgtagaatcagaatgtccattcctgatttcttgatttcctgggtaccgggtctccgacggtgaggctgggcgtgttcgggaatctcgaaacccctttgatcgcggacttcccgtggtatctgctataataatagcaacactatattactacatcatatcgtatcggcaaattccatatgtctgatatacttgcatatggaggcgcaccatgtatcccaaagatttagataacattcttttcgcgacgtaagataaggtctcggcctggtgacttggcctgttcaccgctcgttgagaggtacttgtgatttcaatgatagattgtagcgatctgacaaagaggggaaatgacgagttggctgcccagtgtgttgtgagatacaccattttcgacatttgtggtgccaactgtgggatggattcgtcaggggcaatatgtacaacacatcctatgcatgattatgagctgacgtgatcgtgggctgctcgttagttattcggactacttgagcataagaccaatgttggtctacccaataccgcagttaccgacagatgggatatccttgtaggcgccagacgtataagagagacactcttggactcacctataatagtaccccggcgtactcgcggacccctccagccaaacaggataaggcgaaggcagggctgatttgctcgatacgcaggggatgttccgatcggaaaagatcgagaccctctgaaaggtgcccgattcacagggcactgacgaattgttgagtttggaatcgcgttctatcctggcccttgcacgtcttcgaagatctctaattataaccccttgggcttgtacccaagatcgatcttctaggaacgagagccctttatctgcaactctgaactctatgccacttccaaccttgcagagaatatgctttcaacgacgcgacctgactatcttcgagatgatcttctgacctgctggtcccgtgccgtgtcctgtcttgggacttgactcacaaggttctccctaaatgccaacacttgggaaatatatacagagagctgtgaagtggcagctgagctcgtgtcggatggtgacaccaatcaggcatccgcaggccgtgagaaaaacggggaaccagctgtatgtgtcagacgaactaggagaacccgtgaataagtatgttgtacggagtaaatgaagagaccttggggatcggaagaccatccgagcgggatctccccagactcgagaaatctagatcaatgccctgaggctattttacgtcacggggcggaatatcatttcccctagaggacagcaattacttcatctctcggtggacggcgggctcttccaatcgcaagcgcgccgagagtccgccatcacgtaaacgccccgccaggaaattctggagatgcgtaaaagaaatgcaattgatgtagttgttggggtaaagacgtgccaatgcgtcttttctaacgaatgacagggtgaagctacgagcgtggtagaagatgttgatgtttaccccgcaagtcatccaggtaccagccctggagagcccctccggttggagatatgacatacacatgtaacatgggagatattgatagtctatcaccggctttcttccaaggttgtcaccggcccggcgacattcgcaaagattgcctcaaattgcaattggccttgcctcaactggtcaaacacggcaaactcctcttcaatggcgaaaatcccccggaccgaaacagccaccagtggagctgaaagagagtagggcagtcgatcacgatgcgatctggagcagcgccattcgggctggaacacggagaatgaggcatttagcaacccaaaaaaaaaaactcggaagtttcttatcctagggtgggttcatgacacattgcattccacgatgttcggcagcgatcacatcattccctgtatacatcatccatgcaccctattaagacatctcaggtgaccccccgtggacctgctactatgctcttttcagcttccagcaagtctcttccaggtcacccgctcacctctttttacccctgttcctgtcctcagccacgttccagactgttgaggcaattcttttcgtctcatatcggcccgcatgacgcagcgggattttgctatcggcttgagttcggaaggaggggcgatgagctccaatcagcggagaatgtatcgccggctgttagtcaaagtggagagagaatgatcgttttggggtggaacaaagtggaccggcggatcttaatcagcttcgagacctctatacggttgaacctccccgcctattatcggttataactggtgggagcgggacgtaataataatagaataactaatggaaataagagagtatgtattaatagagacagagataatagggcttactagggattagccagggacgaatagagcagcactagtaaaagctgagaatcaggttttgttgtgtataaaagactagggttccccggattttctgaatccttctgattcccatccattctcatttctcaccttcagtccatggcgacgattggtgatcattgtatttgccagtaagtcttacagcgtttcttgtcctccttgcttgttatcttcgacctaccgagataagcacattctttgtgtcgccttatctcatctcacacgtgccagatgattcatctgagctcatgctgattgccttatagcttctgtcatcttctcgctcttacgtgttaagagatctgcctcacatactgcatcatgtcgtctccagtaactaccccactgtcggagactcccaatggcactggcgcgagcttgcctaatcgcccccagcctaagctttttggaagccaggatggaagctccggctccggcacccccatcggtttccagcgctttcctccccacaacaagcacctagatcatgccgttggaaacgctttgcgacaaccgtccccgcagcccacgcacttggggatccccggtaccccgcaccgtgtgctctccgaggaggacccgggctacattgcggctacctttgagggcaagcagaaacagatggaacaaggtcagtggggttgacaaatgtggggataatgcaattagctaattcccagcagttatggacatcttggaggagaagggcttcttccccagtgactttgtcatctccgaaaccacctggttctataacaagcttggcatcgacgatacctacttccagaccgagtctgtggatgccatcgtgacccagatcctatccctctacgccgccaaagtcgccgcctatgcccgcgatgataagcagctggagattcgtctggataaagaggccgaggaccatgcggtctacatcgataccagcaggcccggtgcggtttcggtcgatggtccacgctacgagcagcgcatcgacgagaagtacgtcaaccactccaaaggtgccaacagctaccgcgtggagaccttccgctcgccgagcactctgccgggcgacaacggccagcagctccgctgctacttcgtgtacaagtgccagttcgccaaccccaacccctcaccgaatgagaccaacatcgatatcattggcgagaagcgcttcttgcaaaaggccactcccaacaccaaggcgatctaccaggaaatcatcgccacggccgttggtcgctccggtcctgtgattgagatgttcgagattgagggaagccgggaaaagcgtctggtgattgcataccgccagggatccgctctgggcttgttcagtgccctgtcggacctgtatcactactaccgcttgaccagctcgcgcaagtacctggagaacttctccaacggaatcactgtgatttcgctctacctgcgtccctcggacaagtccgaaatctccgccaaattccctcccattgaggctgccatccaccagatcatgaaggaggtctcactcttatactgtatccctcagaaccgcttccagagccactttgccactggtcgtctgagcttgcaggagacaatctacgcccactgcgcgtgggtgttcgtacagcagttccttaaccgtctcggttcagaatacacttcgttggccgctcttttggatagcaacaacagtgttcacgcagagttgctctccaagatcaaaaagcgtctgcgtacggagacattcaccgctgactacatcttcgaaattatcaacaaataccccgagctgatccacaagctttacctcgacttcgccaacacccactacgttcagacccaggagtctggtgatgacttcctccccaccctcagttacctgcgtctgcaggtcgacgaggtcctcgatggcgccaagctgaagcagctcatccgtggcaccgcccacaacgagcacgacgagatggttatgacctccttccgcgtgttcaactcctccatcctcaagaccaacttcttcaccccgaccaaggtggctctcagcttccgcttgaagccggacttcctgccagagcatgaatacccccagcccctctacggcatgttcctggtcattagctccgagttccgcggcttccacctgcggttccgtgacatcgctcgtggcggtatccgtatcgtcaagagtcgaaacggagaagcatataacatcaacgctcgctcgttgttcgatgagaattataacttggccaacacccaacagcgcaagaacaaggatattcccgaaggcggtgccaagggtgtcatcctcttggatgctgaccaccaggacaaggcgcgggtcgccttcgagaagtatattgacagtattctcgatctgctcctgccccccgtcagccccggtatcaaggatccgatcgttgatctacacggcaaagacgagatcctcttcatgggtcccgacgagaacaccgctgagctcgttgactgggccaccgaacacgctcgtggccgtggcgctccctggtggaagtcgttcttcactggcaagagccctaagttgggcggtattccccacgacgtttacggcatgaccactctctcggtccgccaatacgtggttggaattcagcgcaagctgaacatcgaccccgcaacacagctcaagctgcagaccggtggtccggacggcgatctcggatccaacgagatcctcctgtccaacgagaagtacggagccattgttgatggatccggtgtgatctacgatccgaacggtctgaaccacgaagagctcatccgcttggccaaagcgcgcgcgatgatctcacactttaacatgaccaagttgtctcccgagggctaccgcgtcctggtcgacgagaagaacatcaagctccccagcggcgaggttgtgcagaacggcatgatcttccggaacacctaccacttgcgcacgcaggagaagttcgatttgttcgtgccctgcggtggccgccccgagtctatcgacctggcgtccgtcggcaagctcatcaaggacaacaaatgcatcattccttacatcgtcgaaggtgccaacctgttcatcacccaggatgccaagctgcgcctcgagaaggccggctgcatcctgtacaaggatgcctccgccaacaagggtggtgtgacatcttcctccctggaagtcctagcctcgctgtctttcaatgacgaggagttcgtcgataacatgtgcattgacgaggatggcgccgtccctgacttctacaaggcctatgtccgcgaagtgcaggagattattcagtcgaacgccgctctcgagttcgaggctatctggcgcgaacatgcgcagactggtgtgctgcgcagtgttcttagtgaccgtctcagcttggctatcaccaagcttgacgaggaactccaaatgaccgagctctgggacaatgttgggctccgtcgttctgtgcttggcgatgccctcccgcgtcgtctgttggagaagatcggtctggaaaccatcttggaacgtgtatgtctcccctccttctcttcttgtatttgaacctccgctaataatcccaggtccctgagaactacctccgtgccatcttcggcagccacctggccagccgcttcgtatacgagtacggcaacaaccccagccagttcgcgttcttcgacttcatgaccaagcgcttggcgaagcttcagtaagctgttggaattagacattcctgtgcgaaagtgctagttttgaaactgttttgtcattatttctgtttttctttttgagaaagacttatccgggtcagcgaaatacttaatacggaacaaaagaagacctgttcccttgacgaatgtatggtttaaaaagtttggcgagcgagaacagagagaggccgcttgggcaagatgatccttggaatccaaattcctacccattggaactgccatagtcctacataactctatcatgcaaattctattatattacaccaacccctcccaatgcttacttccatctgttttgagacgacacagtctcagccataatcagcacgatattcactgccttttaggatgttagtatatgtcaataggacacccggatcgtccttaaaacagaagaactcaccaataacaaatcaactccctcagatacctcaacctcccacctcggcctcaacttcactttggatctactgtagtccatcacattgtgtcgcgagatatgcatgatcttctggttacccatcatgacacccgtacccgacccagccagctgcttcactttcagctcgacttttgcgccgggcgaagcattagcttcaggacggggactggttctgctgctgccgctactgctgccgggactggaattggcattccgcgacgcagatgtagacgcagacgaaagaaacggtgaagccggcgccggctcctgcggcggctcaattgcatcgagcagatcgcgcaaggaattaggcgagttccggcgaacggaggcgtaggagggaaggagtgttggtgctacaggagcctgaacgggatcttgacgtgaatgtggatgtggatgtatatctttctcattccccgcatccccactcccttcttgacctctaaccccaaccccaaccccaacaccagaaacagcactataaggcggcggctcgtcatccgacaccgccaatccactcccactcccactccctacacgcctctccctaaccgccgacgcaagcgcattcacaaaccgcacatcaagcctaaaccccccaccaaccccaatcctcgacccgggcccatccgtcacccacggcgtcgaagcaaccattaattccgcctgctgatcagggagtcgggccacccatttccggatcggcagccacgcgcgtcgcaagacgagcaccggcacgtcctcggcatcgcagactgtgcgcgtcatgtttggccatggtttgccgtacacggtgtagaggaggaccgcgcggttggggctgtctggggtttcgtgggcgcggatgcggtggatggtgaaggcggaggcggtggcggaggtgggggctttggggtgggctgtggagggcgggctggtgtcttgagttggggttattgttaggattgttgcggtgttggctagcaggtctgcggggggagagaggaggtggtggggttggagagctattggtgttgcgggggatatgagggggttggtttttgatttggagttgcgattgggcattgggattgcggtttggtggtggtggtttggtagcttggtggttgatgtggatgttggagggattggttatatcttgtaggttgtgtatatagagatctaggaagttgaagtgatgttgctgagtgggggcgggagtgccggatacgttgtagcactgaggtcaccaattaggaatacagtatatataaacagtcgaatacatcagggactatgtaaccttccatcgcaagtctcgtgctcccctatgtatacaaagaagaatgaagctattcgaacacaaggtcattattatctacggacataacggatatagtatgttgacctatctaccgaggcatgatatataactacaccgactacggagtactacttacatctacgcctcccaatacatacctcataatccattcaatatagttagcatgtcttcaatcgtgccaattttagcacctctagacccaattagaatctcaccacggacagatccttcaccgagtggaacctgctggaaccaggcccacaatatgccgccgaccgaggatagaggcgcagtccagaccggggaagaattatgcgttgaaaggggcaattggaagaaaatcagcgcgagggagttcgtgcagcatcattcgactagtgctgtatgttctaaccaaaggagattagccatgttagcgcgggttagtggctgggaagcttattttcgtctatctaatgccaattgccagatatcaaatggcagatgtcactccggacgtgtcaaacatggatctgtcagtccaccagcccatgagaatccagtacgtatccatcgtctgcttctagttagggcatgccacgaatagatcctccatattacgcgttaatagtgcaggcgtatggccataactgcaatgcataaatggcactacgtggggcctcgaaccggtttctcctcattttagacaaaaggaacccacttttccccgatttcattttctttctttcttctttctaaaatatgaggtcgaaccgtttgtggggctgttactagactgccaagttagcatcctttgctatgggggtctgctaaaggagaacttgccctctgacatttccctagaaaacgagtcattgccttccgtccatattcgggaggattcatattcgccgcgtcgtgccatgtcggacgcacaggaaaaggcgccgccgatccctcctcatccttctgcggggactgccgaggcagaccgcgctgaaggcagtgatcacaatgtcgattccaacgcagaaacccttcgtccagacgaggcgcacccggagcccgaaacactttaccagcgatgtcgggcagcaggccggcggattcgcaatcgcgctgtcatcatagccgagatgctcgggcgaccacatgaaaaaggggatgggttgaattcgccaatgttgccagactactatgaaacactagacgatatccgagcatacgaggcccgccaggcacttgatgaggaagcgcgcctcccgggaacagactatgattcacaagcgcgcctcttgatggaacaaatggggtcccagtccaggctacggcgtccacaccatatcaaagaaccgtgttccgggtcgacaacgccaggaacgccagggactccagatgagtcggcaggacctggcagtccacccggagggctcttatcacatcttctccgtgtatacgccgacaacctccacgcagcccggctgagtagtatgtctacagcgtcagaacccagcccggacgcagaacccaaaccggacgcagaacccatcgcattacccgacacaacgacgggtgaaaagaaagacaagtcgaaatggtacaaccaccccaacaaaccctcccacaactatgcttcctccctcgtcaatgcatccatggatttgtgccgggtcgcgctccccggagccacgggtccccctcccgcgactcccaacgaacgaaagaaggaaaaccgcaagggaaagaaaaacatcaagctcaccgtccacattgccgccattctcgcccgccagcagtacatcatgcagctgtgccgcgctctaatgagatacggcgccccaacccaccgcctggaagagtacatgatgatgacatccaacgtactagacatcaaagcgcagtttatgtacatccccggatgcatgttcatgtccttcgacgaccaggtaactcgcaccaccgaggtaaagatcgtccgcgtagtgcaggggctggacctctcccgtctcgcggaggtacacaacgtctacaaacacgtcgtccacgacatcatcagcgtggaaaaagccatccacgagctagaccagatcatgcagcgcaaaccgcgctataaccgctggctcctcatcctcctgaccggcttagccagcgtcaccgtcggcccatactccttcagcgcccgccccatcgacctccctatcatcttcatgctcggctgtctagtaggcttcatgcagtacgtcgtcgcgcccatctcagcgacctactccaacgtgctcgaagtcaccgtcgccatcctcgtctcgttcatctcgcgcgcgttcggcagcatccagcataacggcgagcgcgtcttctgcttctccgccatggtgcagtcctccatagcaatgatcctcccaggcttcgccgtgttaagcagcagtctcgagctgcagtcgcaccagatgaacgcgggctcgatccgcctcgtcttcacgattatctactcgctcttcctcgggtacggcgttaccgtcggcacgaccatctacgggctgatggacaagaacgccacgaacgaggcgacgtgctcgcatctgccggaggtctggggcaacgaatacatccagcacttccccttcgtcgcgctgttctgtctcttcgcggggctgatcaatcagtccaagccgagacagttacccgtgactatcttcatgggtatgtgcggctacatcgcgaattactttagcacgaagaagctcggcgcgaaccaggttgctaataccgtgggcgcgtttaccattgggcttctggctaatctgtatagtcgggtgtggcacggccatgcggctgctgctattattccgggtatattcaccctcgtcccgtcgggtctggcgtccagtgggtcgattatctctggcttgcagtatgccgaagctgttgcggcgggtgatgctactaatagtgcggcatctaatagctcgcttaccgcgctgggatacggcatgatccagacggccattggtatttccgtcgggctgttcatctccgatctgattgtttacccgcatggaaagaagcggagtggaattttcagtctgtagacctccatcttcgtttatattgtattatttgcattagcgtcttgattccagagcgaaaaaagcgtcccatttatactagatattaataccgaatctcaatctcaatgtcatgtcacaatatcaacatcaacatcaacatcacaatgtcaacacagcccccaaaaaagcaatccaagcaggcaaatccgcaacaaccatccgaatccggtgaatccccacccatcgtcgcatatcagccgacgcgcccaccccactctcgcccaaatcctctctaacagcaacgttatccacaatcctcttcaccggcccggcgacaaacggcacgaagaccaaatgtccgaccgcgccggctagccccacccagtagaacgccgtcgtctgcagcggcttttgcgggtagtagcggttcaagaagagcgtgccggccgcggaggttattgtgccgaggttcagggccaggacggtccatactgcgcggttgaagacgtgggagaaccattttggtaggactttgtcggatgtgggttggagggagggctggaggaagcccgtgttggttgttagttctaggatggcgtgtgcgagggtacccgtgctggttgctaagggtagagtatggaggaggaggtatgggtttaggattagaccggaggccattttgattattaggtggtgagggtggtgagggtagtaaggtgggatttagatgggtgagaaagggagtaagtgagacagcaaggcgatatgcatcaattggggccaaattgactaatatccgtgggctggtgggttgatctcaccttcatccccgttacgctgacaatggccagccagcttcaaacactctttcaaaagcattctcagatatggtgatttcagctaggctgaaaatgatggctcaccagacataatggaagatgactacagcctgatgttgaatgtttgtccccttcagtcaaacacatacttcatctgatctcaacggctctgtataaatatcctcagcatcatgctcaacttctattccttgtcaaccttctccatcaatttggcttatattatcactggtccatcaaatatcggcctgcccattcagcttacccttattctaccaactctcatcttactttctctcacactcctctcccaaaagaccatggactgaggagagtccctcaagtcttctctcacgaggaccttaatgtccatgccaaatcggcatatctcaccccttacatatatttctctatataatcaggtgagttcaaggcctatgaaataccatctgaactggaatagctaatccctcccagcaatatagctagtgcaaattcctccacattattgacgagaaggtcctcctacgcatcagacgcggctacaacactcccgccgacaagctagaacagcaatataccaaccttgtcatggtcactgagcgcgtcggtcggttggcacaccgacctgaacttccaccaacctggaggattcaccccgtcatcagcgtgcagcaatgagagcctgcgacgacggcagatcccttcggcagggaggcgaaaaaagtgcacgcagcctatgccgagcggttctggagcgtctccgatgttgacgccgagactgtccatttcgcaaataccgtacggaagtgtgctatatataatccgtgaggggaatttctcccgtgacagacatctgatgtggaaagcaaagggagctgaaatataaccgagaggtatatctatatatcctcaatggtaaggctcaaccacgcagcgaaaaacttaaccaaagccacacttctaactatcaaaacgcgcagggcgatcttacctgattatcgaagaagcgtctcaaatggtcgactcacaagcgctaaatggtatcatgcgcaatctgaatggggttgaaaaaagcaatccttggtggggattgtgcacagcttccaccgacggtgatatcgagagacattcggtggatgcctcagaaggcaacaattatcccggcattcagaagaccggatccaaaccctgccctcgaactatcgggcaaacacggtgctcgatcacagggctccggaaatgtcgctacaacatacgaggaacgtggccttgcgttcaagaggttgcgtctcttgatgaccagcaactgcatcgggccgtgggtactctggctacgaagcgtggctggcaatctctacgcgaccatccacctatccattggtagtcgtgtaatgctgctggataatctctggatgcagcgcgagcttttcaatgggtagtttgggaccggagaggatatagtttggcctcccggtaccatagatcctcgtcgtgagcggccatccaccatactcgtcaggtttgacgagtacactggtcgcgggattcggccagaaatatcctcagcagtctcgattgtccgttccacccgcgaatttttccttgggacaatacagtgcactcgtacacagtttccagtaatgctagcttatgcgatcactgtgcacaagtctcagggtaagggtggaccgggccgttcttaacatttccgagagaccccaatcctctggactgcactatgtggccgtctcgcgtatccgcactctccggggtatcctgttcgaggagagcttcaactttgaccgcatccagcctacacagcctacggcgacaatgcttctacgtttcgggaaccgtacccggcgcctacctcagcatattacgcgcgaggctgttcccgaatcccccgtagccagtcttctacttcgaccgtctccgcggcagtccactccgtcccgaattccaatccgctctactaatgcttcgtactcgagttccttgccttcttggagaagtacggaaactgttctggttcgtcgctcagctgctgctatagccttgtcattcatttactgaccgtattctattacttgtacagtcacaggctccatttaccgacgattcagaatatatgggttaaggatctgacagcgagaaaatgaagcttgaacgtcacttggacgattcgtaaagtacgcgtcttatcgaaggcgctgaccaaacacgcgatgcggaattgaagctttgtgaagacgatatcaaaatgagaagatcacaggcatggaagataatgtcaagaagctgccgcctcaacatgcctatccttttccacgcctcactgtcggggatgcaccaagagataaagggggaaatggctggttaatcttgaaccaaatgacccagagtcaacacgcgagaaggttgagcttctgacatgtgggcttatatataattttagtgagttcattcttttctcatttacgtgatttgtctctattgctgagtgttgctgatacattatttagaaaagtggaacatggtccgtgaatagggatttctatcaccactttaagtccacttgaagcggtcaccagattcaacagcggatatgggagatgggaacacacatgacgagctggtgcttatatgaagattatcaagatggctggtcgacgaagaactttactgtcgcaagctctctcgcaagctctctctaggagggagatgcgagaaaggtaattataagaaggtcactgggattggggcactgaaaaaaattcgcccaacagcagacttcggttctctccaattccttgaatttcgagatacccagcaaaaagcagaaatctttgaaatcagccattgatgactgtgacgtggacgattgctgggaaagctcataccatgcgcttggttcgcaagcagaaatgggagaagggagatccactagtaagaagcagcgaacatacttcgccatctcatcattcggagccggcatgatccggatactcagagggtgattgtggaatccaagctacaggtagacagtgatgttagtgtgtccatgaagcccgccagcaaacgcctctaacaattcaaaaaacagctccacccccacaagtgaccttctcttgccctcgaagctagaaccgacataccaatccgatggagaaacagtctgacgaaaaaggggacgaactccgcgcgttggatgggaccgcaaatggctcgacaccgtccagattggaaggattaaccctaaatggatcgacacaaagagtaccgcaacagaagaaactaccaaggctctagaaaaggaaattgattcctctccatccccactgtatctgaggtaccttggacccggcagctcctcacaagcaagcggctgtcgcagctgggatatatatcatattctcttctttacggggaaacacaggccttacattagtgattttactgtgccaatagtatttacctattctcagcctttgcggaagtttcatggtatcatcgactcgcgcctattccgcatggcatccgggtttaggacatgttactccttggacaaaacctggaagtcatgcaacgcattttcactgtggcatacagatggttagctcgctccagcggatggaacttcaggagcatggaagagttttccaactttgcgctggcgttgatgattgcggtggataattgattggcgagggttcttagagagagactagaattgaatagtgaagcccgtttattctttgaaaattgataccctctacggtgtaagagtgattagattctacaagtgttatgcgaactcttttggtgacggtgattttcacgcgacgtaatagactgtttttcggtagttactggcaagcaagctccacgtctccgaagtggattactctcttgcgcaatggttgcctatgctgtgtattgtctggtttgaactaacacaatttcgcagcgctatggatgatctcgacgtatagacaaatgatatctgacttggtggatcgaaaacgtcaacactcgatcgatctcgggactgaccgctctggcagagggtgcctatgacacgtgacaagtaattcacagtcacatgtcagctcattcttccccttttttgctatgttgtactacgaattacagatcaggaagaacatacaagatatattgcatgtggtctaataactaaggctctcgacatagtgaaaaaggaatataaacaatgccaacataaatctctcatggacaagacaatcataaactctcagaaatccacagaacaagcattccacagtatgaagacaacgaagagcaatcgatcgatatcgcgaacattgagcagcaatctcgttgaattaagatcgattaattgccaatcttctccgcaaaccacaccaccagatgactgacagtcgggtgactccacgtcaaagtcggaggcaccgcaaccttgagcgtctgctgcagctggcgacgcaaagtgaccgtcatgaccgagtctacacctagatcagcgagggctgccttggaatccacatcctcagctgtcatctgcaacaccttggccacacagccccggatcttctcatccaggtacgtcttgagttccggtccggatgaaggaatcgcatcactgccattagaacccgcaacaaccggcgtgttgccagacaacgcgcccacgcgacgcaccgcaatatcattgaggatggacaccggcaccggctccccgtcctcaaaggcacgacttcgcaagacgactccgtggtccatatcatacttggcgaggtgctgccaggcagaaaaagcctcatcgcgcgtgatatctgtgattcccttggattccaattccgcattaatgaagtctgtgctggcgcccatacctaggcctcgccacgacgtccactggaaggacacggccgagtcgctcaggcgcgcccggtgcgtagccagtgtatctaagaaagcgttgccgctgccgtaagaggcttggccagtaaatccgactaggtttccgcaagaggaaaacatgatgaagaaatcaacactcttcggggggaagacttcatgcaaggctagtgcacccgcaattttgggcgcgagaacccggttgaaggcgtcgcgtgtggtttgcattaccagctcgttatccaggacaccggcggcatggacgacaccctggactgcagggagggcgaggcggtctagggccgttgacagctgctccactgcatccgacttggtgatgtctagggggaggacatggacggaggcaccgcgactctccaggaggcggatcttggcaatggcaggctggagatccgtgctgacctggtcccaactgcggcgaggcggaagagcacgtcgcgagatgagcagtagacgtctggctcctttctcgaccaggaagtcggccacctcgagcccgagtataccgagaccaccagtgatgagatacgtgccctcggcgcgaggaagcaggcgaggaccgtcactgacagggcgcagcttgctgcgcggtaggctgcggaaccgcgaggtgcgggcgattccatcgctaattcggatgatgccggcgccgtggatgtatctcatcgtggagagggggattatgggctcttcaatgtcgatgagggatcccaaatcgggatgctcactagcgatgatccgcgccagtccaaacaacggggattgggccagggcagtggcagtttgaccatcgcccacgttcgcagtgagtgtgaagactttaatgggcagtgagccattgacaatgaatttgataagttctagcaggttccaagtgaacgactcggatgcagcgggaatctctgccagcgaggcgacctcgccggggatgtaggccacgacggttcccttctcgagtgggagggatagagcgttgctgaagaagtcctctgtgccggagaactggaaagattgaatttgagtcggcagagtcgcggcatacttggccaaggtggcagcatcgggcgagatcataatcaccgtcatgatgggcaaaggctcttcggccggggtggccggtggccaggcgatttgatgcacgagactctccatgctgccacttacgccgggtgtgccttcaatctcagagaaacgcatggccgtgaactttgcgaggacctcacccgtcttgctcagcacgctaacgtgagaggtgggcactgcgtcggaggcctccttgacgaagagccagctgatcttaggcggatcctccgaggtgaatatctccacacgctcgatatgggccggcatccgcagtgcagctgtttggaagacggtagagccgatggaggtggcagcgtcgagaatcggggcccaggaggaagaatcccagggcaggggcgcatccccgaggactgcaggattgacatcaacgcgcgccagcatctccttggtattgcggtagtgctctgttaccgcccaggggaatcccatggctgagacacctactttgtccaagtagtcaattgaaaagttgtctggaagcttggtgaccagtcgcgcgttgacggcggcgaggtcgatgcgatctactggacccagaaccttccggttccaatatgcagtggtgtgagtgacccaggaggcatcgtcatccaacagcgaaggctcgctcggaatcaggcgggaaacgaccttgacctgatcctgttgcaccacgacctggacggaccgtggcgcgttgatggcgacaggaacgcggagcaccacgttctggagtacctgggcaccggtgcccttcaagaaggtattaataagaccagctgccggaacgatctcggtgccgtgcagaggatggctgccggggaacggcttcgtttcgttgtccagccgggtagtatagacgaatgtgtcggttccaggcactgcaatacgctgtcctagaagcgtgtgcttctcgacatcatgcgtgaggccagtattgaggggcgccgtctctaccttgcgccagatgggcttatgcatccaggtcgtcgtaggcagtccggtggcccagcgtccaggcatctgcgccgcccagttcacttctgcgccgcgacaatgaagctgtgcgatactgtgcaggatatgcttctcagtcggcttttggcgaaggagagtcggaatgaccgcaaaattctccatgcctgcgtccataagcgtctcattgatggagtgagacaccactggatgggctgagacttccaggaagaggcgatatccgtcctcaacggccgcctgaatggccgtggtgagacgcacgcggttgaccatgttgccggtccagtattccacgtcgcgcaggtcctggccgcgagcatcgaccagtgcggtagaatacagcttgatggtgggagccgtgggggccagagtctgtccgagcgcatctcgcaggggatccatgaggccattcagagttggactatggaaggcaatgtcgctcttaacggtgaaagttttcacgcctcgtgccttgaaggcttctactgcctcggccactatctccttgtctccagccaccacgcaggaagaaggcgatgaatcgatggccacaaccaggtcctgtcgggagcccaatatctgttcagcctcgccactaggaaggttgacaagaatcatgccgcccttgcccatgacctgtcggtataataacgctctgcgagtcacgataagcgcaccctctgctggggataaagccccggccacaacactggccgcaatttcgcccactgagtggccgatcacggcctgtggagtgatgccattgctctgcagcacggcactaagtccgatttgcatgagataggtcaggatttgaacccgatcagacgactcaaaatcgcctgtccggagcagctcgatgggtgataggccaatctcagcttggatcagctcatcgagtggctggatggctgcggagaacacaggattgtgaatcagttgcttgcccatgtctggccactgcgcaccgtgcccggaaaatacccagactacgtccttgctgatttctgtgcccaacacacggctctgagtcgtgaaaggatggctgactccattgaccaatgcttgtaggacttgggtagcatcaagatggtcgtcaactacaagcgctgctcggtagtcatggtgatctcgtcgcgtagccaaagtcgtgagaacttcactcagattatggtcttttccttcagcggccatccactcgcgcaacgttttggcctgcagggctagccgtttttcttggggccccgacaataacaagaggcctggtccagtcactgctccatcatccaggggatctggctgtaggacatgactgaactcctcgatgactgcgtgagaaacggttcctccgtagccatacgagcaaacacctgctcgacgaatggggtctgaggagggccacggagtggcctcctgaacgaccttcacaccggccttgtcccagtcaattcggctattgagctttgtcaagttggcctggggcggcaggatgcccttttggatagtcaggattgcttttataaagcccataactcctgcaccagcctccaggtgaccaatattcggcttgacggacccaatgtagcacgggtcgtcggcgtggcggtcagttccgtagacgcctgcaatggctgatatttcagttgggtcgcccaagggcgtagacgtggcatgagcttccacatatcgcacggtgctaggatcgacacccgcaacggtaagagcagtccgcgctgctaactgttgcgctttggcattgggggccatgatgccgttcgtcttcccatcctgggctactgcactgcccttgataacggccaagacattatcatggtcaagcaatgcacggtgtagacttttgagtacgagggcgccggcgccttcacctctagcgtacccatgggcgtcatcatcgaaggacttgcaagatccatcagacgagatggccccggctttgtcgaggacgcgggtcagtcccggtccacagagggcattgacgcctccaacaatagccacctttgattcccccaaccggatggcctgaacaccatgatggatggcgacgagggacgaggcacaggccgcatccacggcactgctgggtcccatcaggttgaggtgataagaaatgcgattgggcacgccacaatacgcggtgcctatgcccatccaggcctcgacattcggcagatcctccagcactagcttggagtagtcgtccgagttcacaccccagaagaccgccgtgtcgctcccagacaggctcttggcaggaatgccggcatcctcaagtgcttccgaggccacctctagcgagactcgctgttggggatccatctgctcggcctccttaggggagatgccgaagaactgacagtcaaagtcctcgaggcgatccaagaaataaccacgcgatgtcgtcttcttgagctcttttgcatttcgtggatcccggcgatagtaaggctcccagcgcatcggtgggatctcactcactgcacttttctgactgaggagcgattgccagagaagctcggggctgtggttgcctcccgctacacggcagcccattcccaccacggccacgtcggtggagaattcctattcactgtcagtccgaggtacgcttgggcagaaatgacaacgttgggaggggccacatacatattcactgtattcagtcttaggggtttcagctggtgctggggatgttttcccagagggatatgtagaaggtgaaacagaattcatgtttgtcagtagcagtttggagactcagtctccttagcaaagtcaagcttattcatgaaaatgtctacagctatcggttattgatgtccctttatatcttttgctcaccagtacaacatcaggaaatcctcccatcacccccctccacggcggtttattatcgtctcggaaaagccgatatgcagcatcaacagagatagcggattgtggtctagtttccgaatggggacatctttatcttcaaccattcgtccattcggggatattgtcgtgtttccgccatattgcggccaggtttcgcaagaataaagttcagcgacagataacggggatctatggataggagccaagaattcttttcccgtccgtccgtaagtaatggtaatggcgatcttgagacatcgaggattggcggctgcagactgtcgtacaccaagggccaagcctctgtcagccctaggcctgaaagggatgcatgctgatttttggcccaaaggagtgccgggaacgatttcttcaaaggtactagatgagctatctcaccatttaggaacctcatgagtcctccgtacagatactccggaggaggagaaggtgcatcgttcaaaaactcccaagtgtggatcaggccatttcaacatgcttcaacaggcagcccatggggaactgattgaatgcgatagctagtatatatgcgacggtagagacacacgacgttttctggatattctttaggagaagagattgaatactcgtggttcttctgtaaaatccgattttcaccagttggtcaacattcgcaagcataatggctccatttgttccctaccactactcggccggccagtcgactattgttaagtgtgtaactagctccctttaccggtcttttgatcgctgacatagccagatttggtggtcttctcaccaccgagttcctcgaacctccaccaggtcgttgttttctcttccgtcagacataccgccacaccattgaaggctcgatcccagaaaatctgcgcaagctcatcaatagcgccgatcgaccaaagggtccgcctccgcatttccaccaattccaaaccgagtacttccgtgtcggacagggagtgctcgggattgcagtggacggggtcgtccgccgcatcactccagaagatggcgaaatctcggtcaaggcgggcagtgtgcataactttttcatccatccggattctcccgagagcatgacggtctacctgagtgcgtcagactccgggaacgactaccagctcgatcgggtcttcttcgaaaactggtacggctattggcacgatgcgttgttgcacgacggagggatcgactggatccagttcctcgcggtaatgatctatcccccgcacaaaatcttccttatcatcggctgacatagtagtagattcaagacggcggggatgcctacacacccgctcctgcatgggtgccctttcgccggcaggttggatactggacctgtgtaatcatcggccgctggattggcggactcctagggtataagccattcttccgagaatataccacggattgggactttgctgtcgccaagatgaagggttcgttctttcagcggcatctggtgcatgctgcattcgaggaggagaaatcctggacgaagcaggtagagctggaacccaaggctaagcctgaaaacgctgagtttgagcagtggacggaggatatgtctcccacctcattgaccctgggcgcagttgcgtatgagcaggtgcttttcaacggcgtacagcccgggtcagcgaatgagtctaatggtaactccacaggggtcgagagcaatttggagcagtcaggttcttggacgcagcgacggacagtggtggacaatgcgggaaagtagagatatatcacccgaaacctgctagtccatgagtcccagttcgtttgaattcaattgttatttttactccttgcttcctgtttcctgcttcctgcgtcggtcgagtacgatatgagatgatgattgattgtctagactgagatatgttcagatgatctggacggcggggaaaattcatgatctcacgtggctggcgtgtcacttgctatagaacactacgtctcttatacaccctattcaaaataatcctgcttcccataaattcctctttctacgtggactattaaacatagatcggttggttgtcgtacaccagggctagcaggatttcaaaacctcctctcagaggttgtagcacacgtttgacggccaactgtccattgaggcaagtttcccatagtatttcgaggagaattacaaaaacatctttgataatagttaggcagacaggacaggatatacgtggagacaatgtatcttgctgtgagagctctatacgagcagactccgattctcctttaggaaccctaaactgtcgcccacctagctgagtcccaatctcaaaataggtttatccacgtttatgaggacataagtatagagaatctgccctgaggactactttccggcatcaacactatggatctcctacagctcgcaccaacgcaccttctggcgatactgctcagtagtacgggcgcattcgtccttgtcacatacctcctccgtgcaggacatcgacccccagagctcccgaacggtatggtattgcaaaggataaggtaggaattcaaatctaacagatgcacagggcctccaactgttcctctttttggaaacgaactgcaagtgccaaagtcggatgcacattttcagtaaaggacaactctctgtgatgtagggggttaacatgctaagtacttcacataggttttctcagtgggctaaggaatatggcggtttcttcacgctgaagcgatacaacaacaccaccatcgtcatcagcgatcagaaactgatcaagacactactggacaagaagagcaacatatattcccatcgaccagcatcattggtatctcacctgatcacgcagagcgaccatctcctggtcatgcagtacggggagagatggcgcatgttacgtaaaaccatccatcaatacttcatggagccccgttgcgagcgcgagcactggaaagtccaagaggcggaggccaaacagatgctgcatgactatctgatcatgccagaggatcacatgctgcatccaaagcgttacagtaacagtatcaccaactcacttgtctttgggattcgcaccaaaactgtccacgatgagtacatgaagaagcttttctatctaatggacaaatggtctttagtgcaggagctgggcgccaccccacctgtcgactcttttgctctgctgcgctatgtgccgcagtggctgttaggcaactggcggaaccgagcggtcgaagtgggtgatctaatgcagtctctttaccagactgttctagaccaagtgaaagagcgccgccaacggggtgttcagcgcgactcctttatggatcgggttcttgatacactgaaacaaactccgctctccgagaatgaactacggttcctaggaggagttctgatggaaggaggctccgatacttcttcctcgcttatattgaccattatccaggccatgactaagtatccagaagtgcaggcaaggtatgctgaccgcgccaagttttttatccaatgggaaagctcatagggtggtattgcagggcccatgcagaaatcgactctattatcggctatgaacgctccccggcttggtctgaccggtccaagttgccctacatcaacatgattatcaaagaatcccaccgctggcgtcctgttagccccttgggggttacccatgccgttgcggaaggtttgttgaaaccggtatcttctctctcaaaataacaagagattggctaacaaatctcctcagacgaccacgtcgatgggaaactcatcccgcaaggatcgagcatcgttctcaacgtctggggcatgcatcatgacagtgagcgatggcaggaacctgagcatttccagcctgaacgcttcgccgatttcccagccttagcctcggcctacgcagcgtccgaacggcgagaccacttcggttacggggcgggccgacgcatctgcccgggcatccacttggcggaacgaaacttgataatcggcgttgccaagctgctctgggcctttgagttcctcgagccacccggcagcgacagtgacatttcggctcactccggcgctagtaagggattccttcattgccccaaggactatggatgtgccatccgtctccgttctccggagaagcgagggaccattatgcgggagtttgccgaggcacaagaggtatttgctcgatttgattagattagagcatacgctctaatatgacgattaccccctcctctactccatcgggcattgttatgcgagctgtcagcgcggcatcaaaaccttattttcctgcagatcatccgtgtaatcaatgcagtatgttccgatgtggatacattcgagtcaatcaaagcccacaattggtatcgcctactttttcctgacattatcttacttctttgcttctaacggcataggattttaagtttatagcaccggggaagcggcgaggcaagtaaactaaatctattcgtgcattttagtattaccacatggctactacatcgtacctagaataggcaatttgactcctgtacatcgatgcacgtcgcattgtagaggcataatagcatcactgtataacggcaactccgtttctgcagctcatgcatgtcgctgcaaggagcaccagaaggaccttctccgattccccacagattggaactaatttttgagataaggtgagtgctctagcacgccttaggcttggttggggttcacggagtgtctggataggacttgggttggattatcgtgaagaattcctctagcgctcgttggtagtgctataggactcgctatcgggactcacgctaggggttactttaatttactttgatttatttaccaatttattgtattgctacctagctaactacgcctcttccgcttgaaaatatttcttcactatcactatccatgtctataaaatctgtgattatatgccgcttatagtttagtactagtctattttataccatatacatggcgatcccacgtgtatctatctttccaatataggacgaagcttttccattagtacttagtaaatctgaccaaaactgaatgcccgtaagatctctcacctataaaatgatagaatgaattccctacaaggccattccaaccttggaaggctacctaatgtctattgtcttatctatccgacttcggccaatagaacaatcacgctcgcctattcttccaacaaagggatgtggcaattcagccaatgtccacgacaatagctgacgacatgacacactagtgggatttgtgggtgtttcgccagcatattgctcttttctagtctttattctgctcttcgttttttttcatgtctcatcctgtgcagggaagcccataatctacaacccctgtatttgcgcgaggcttcgatatgcaaacctcaggcatccaatcccaacacaactcatttgtgtcttcgatctacctttcggcccctccaccccctcccatctagtcttgagtagtctggagggaaattgcttttaaggttccgaccgccatttggagtcgaatgaatctggtctgaatgaatatctgaattttgctgtcctccactccaccgctccgtcatgtactccactttctccgccaacttcgacaccacgatcgacgcctcccgtgagaaatcagccacgcctatcacagctccacgaccaaagcgcaatcaggttgctcgggcctgtgactggtgtcggctcaatcgtgtcagatgcgatgacaagcagccatgtcacaactgcctgaatcgaggaggttcttgcagcaacacaaagccacaggaggccacctcgctcccagctgcaaatcggtaggaatcagatatctatctccctcatgatcacatggggatgggagtaaatggtttgctgattcacatcgacagagagttgcaacggctacgaactgaggtcaaggaccttcaagatcaaatcgcgaaactcaaagatggagcggaaatccaagcacagacgggtttcgcgacgcccccactatcggatgctgcccacacttcgttcgactttgcggagctcagcaataccacagaaggatggcaaggtctgcagcagacgggacagattcactacgggcccttgtcatcctcatattttgtctctcgaatcactcgctatctctcacaagccctaaaccagccattggaagatgcgaagttagaggcatgcatggcccgttttaattatgttaccccgacccatcaaccctctcgatgggatgcaagccccaacagtcaggcggatcagcctccagatggaaatgaggaggccgagggtctgacccggtcacaagaggaacactttatcaatctactctggcagtcttttcattgtgtctatcctatcctcgatgaacgcgagtttcagcaacattatgactcactatggtctaattccacagatggaatgtctacccggaagccatccgccttggtcgatgtgctattagcggtctgtatgcagtacagcagcaccttctttatcaatggagacaaccagcagtcagattcggagtctgaatggcagaccaaaaacgcgaatctagccagtcggacttactaccaaagggcccagaggcttctgcagagtgagctcgaaaatccaaccatcatggtcgtgcagagtcacatttattcgattgtctacttgtacaacacctccctgctgaatacggcacacattaacctgggtgccacgctacgaatcgcccatgcgctgcggctgcatatccgcccgctggacgggacctcccccgagcagcaggagctacagcgccggatttggtggacactctatcggatcgacagccagctctcgatggccctgggtcggcccccactcattcagttgtcccatgtcagctgcgggctaccaggggatgatcgggagcatgcccggctgtctggcacagtcctcctcacgaataatgaggatatcagctggctcagcttccatgtccagtgcacaaagctcatatatcttgttcagggtgtgcagacagcgttacaccggaaatgttcccagttgctgagcgggaataaggttaaggatctatatgacgacccgcgcctcctcgagagcttggcagagtttctcggaggggagatgacagccattcataactgggttcaaaacgtgccgcagtccctatgtaatgctcgcaagggggcgggggacccattctccaccaatcgggacgcgttgaatctgtctccgtatagcccactttggctgcaatgccaacgtctcctgctggagctccactatcaccatcttgtgatctcgacactgcgtcccttcatgcgattccctcccgtgagctcctccgtgaccccacggaccgacgtttacaatatctcctgtctgaatcacgctatggcaattaccagtatcctcaaccaagtgctatccgagacagatctcctgcgcgggtggtcgcccatcttccagtaccagtgggatgctatcctgtgtaccctgggatttgtgctcgccaatcccgtctgtcccccaaccccttctgcccgcaagtcattgcagacggcgattcgcacgctggacctcgtgagtgatcactttttggcagccaaaaacgcggcgcaggtcgtccgccaagtcagttgccaggcggatcgactcatcaataatgtccaacaaggtctaactcggcgacaagtaccgcgtacgagccagcccttgtccaccagggcgcagaatcccaggccgccgtcgaatcagaactcgttcgtcgcatccgggcaaccgggggtccggtccaactccctaaagcgggcgctgccaccgaccaccctggaaatgtcgtcctaccagccaatgcccaactttgaagcgcgcatgcacctaacggagatgatgccgattggttcattacccgagctatctccttctttggggacgacggagtctctctcgatgccctcggccacctctgctgacatggtcaccggtactgaagcccagtggctgcatgcgagtgcgatgatcatggattcctggactaccaatacatgattaaccgtgtgcttttttcactattccttttttgccttactgcatttacattttgtccgacttagagtaccataatccatagttgctaaccaagcagcgggttctgctagaggggagaagtagaaaagatacaaacaaactggataaataacttatttatagtacatatgtactgaattatgtgttggagcaaggattaggatataactaatcatattatcatcttacgttgtgaaaattataggaaaattttcgtagactcttctagataccagtagcaagttttagacacaagattaggaatattcacacttccttatccttgtctttcttttcttaacagagacataggggaggacaattcgtatattaaggggattggtatagaacccccggccggaggtacaccttcctaatcgggtaacgctagagatcacatgatccatcacagtctcgttactattcctagacgtcttttttatcaattatacgaagaaatcagggtgacgaagatatatcaacagtgtagaactaggtacagtataaacctacgatatatctgatttctcaagagccaaaatgacagatcaggtgatatcttgtcgtgtcaatctagcctggtgacctggcacagacgaccaccagcctcgacttgccagttctcactgccaatagccgtcggcacatagaaagtttggaacgaatcatatttttttcttgatcgcgtacagcgaattatagttgtgaccgtaaaaggtctgcttccaatccggctgctggggatccgcctgtccgcatggtaagccagtggtctcaaatcgtgaatgtctgtcgtcttgcctcgctcatatagcatcccgaatctggactcaaggccgtgaggatcggcacccatttggttgtcatccggtctgccagggttttcatcttggtgagattcgcaccggtgggccagtctctggatgatgtgtgtgtcaggaagcatatcgaaacaaaaaagttccacggcatgtcagataaagagaacgtacgtagataagatgacggtaattgctgctgtgcgccacgcaggcagaactgaattccagacattgccagtcacagatgacgagacattcagaccaatacccacgaacgtgacaccatccacggtgattctctgtatggcattcgtgagttgcgagttattgtgctgaatgaggtcgagcggaagaagacggccgccatattgcgcgttttgcactagttgcatcaggtcgggctcgatcagttttgtataatgctggaaatacgatggtgactcggtgatgttcatggtataggaaatgtccagtttgtgcagttcttgcagaaagggcgccaacagtctcttggcctctactgcggtatacacagggagtgtcagcggggtgagcagaaacgttgagtgtgtgatttgtgcaatcgccatcccaccagatgcggtgtatgtgggtaggtggcgatggtagtgtcctacagcttcaaagaaacactgcgacgaggggttcttgttctcaaattggataacgacgcctgtgacggggaagtcgggaaacgccttgacggtcatggagtacacgaccccatatgtccctccgccacctccgctaagtgcccagtacagatctgggttctgggtaggcgatgcggtcagaaatcggcccattccatcgacaacctcccattccaagacttggtcggcactaagaccgtactgagagctcagggccgagtggccccctccttgcgtgaaccccccggctgggcctacagtggaacattccccggccactatcaccagcccttttagataggcagccttgttgatgtccgtgccttgaacgcccgcagccatccgcatcgctggcccggtatagtgtgcgttggtatagttcaggaaatcaatgtccttgagataatgggtccagatggatagtgcgcctgcaccagtcgacttccctaaataactaggatgcatgattagcgagagcatggcattgttactggatgatgcatactcatggcctgtgttgcgaatgacgagacgaatgtttctttcctgggaaaatcgaatggtctgaatgaagtcgtctggggagctagcattgacagcatacaagaccatcgcacctagcgtgcacggcttcgatcggggggtaaaggcatcgcaggtttcattggccacggtggctgccatgatggaagaggaggataaatcgctatttgatgcggttgattcaacaggccggcgatggggctcgtcggatgcattggattacttactggagctctggcttggtccactgctgtctcagagagcgacactcattggcgatatagagggggtcatgacaaggctgtcctagtggttgcgtgttcactaaccatccgccaatgaatgtgttgaaccgcgaccagtcgtctgaggacggccaacatgtatcaccgggcatgcatcggcaattcgaagacaatccagtcgaaggttgtaggattgatatgatacaaaataggacaaggtattggcagctgtgaagacgcattgtgaagcgagctgttaagtaaatccaatttcgatatgcccgctagggaaaaacaattcttgggtttaagaacatataccattgatctcgctctaggttctcgaatctaaaactgggtgccaacatgaattccgccgtcgaccaacatattcgtgccagatacgaagctggccagcggactcgccaggaacactgccacggccgccacctctttcggcccacccaaccgcttcagaggaattttcagccgctgttcctccacccattccgggttgatctttgaatacaactcccagggaccacccttgcacagaatcggtcccggcgagatggcattcacccgaatgctcttcggtcctaaaaagtgggacaattcctggacatgctgcagctgcgctgccttgcagggcccataggctgcagggggtgaccggtagaattcacgccccatgaaggagctctgcacgatgatggatgcctggggagacttttccaagtagggagtggccaccttgaccagctcgacgaaacccatgacatcgatcgcaaaactgctctcccagtgctctgtctcaccttccatatgcatcggcgatgctacagccagtcagtttgcattctaactagggagtgccgggaaatcaatcaccattggcgataatcacgtcaattcgaccaagtcgctgggcggagctctcgacccactggacgagggcatttttgctagcaacatcgaatgccgttcccacggcgcgggcgctatttccctcggggagcgtaggatagaagtcatcatactcagtattggtgacggtccgggcgcagtaggatacattggcctcctcctccaggaatttatgcaccattgcctctcccataccccgcgtgcctcctagtccacgttagtcagagctaagttgatagatttctctcttacttacctgtgataagcacatgggcacctttgagaccagtaatgagcaccataatgacaataactttcgaaatatttgattggaatgtgaataggaacgtgtaggaagataaaacaaagagacctgaaaacggcgaaataggttggaaataatcattggctctcagactatacgttagcctcctcaagtaacaagttggccaaaattacccgatttggacagtccccaactccgagactcctttgggaagtcaacatatatttggactagacagcgaaaggaggaacatgagatgggctattgtttccaatcccttttgagcccatcagtctccgccttttctagtcggcaatatgattctctgttgaaggagttttgatagtcttacagcgctttccatcttcatcatggtagaaaatcatcattcgtctttagaggaggcaaatacacccgtccagtccgatggtgatgtgcagaaatccgagttggctgaaattgatggaccatcgtcgaaatcttcacggattgcagcaggggaatcgattgcagacagcgttcgcaacttccttgaaatacgccaaggtggcattcccggtgacactggagtggtctttcacaagatctcagccattggaagcggaaccggagtgagtacatctaatccaaccgaaagaatcaggattgacgcttgatagtcacaagatgcacccaccgtctcatcggcagccgagtcggcttttgggctgttgagtcctctacaaaatcgacaaaggaaacagtattctcgacccattctcagcggattctcaggcacgatcgaccccggagaaatgttgttggtactaggtaaacccgggagcgggtgtacaactttcctgaagaccctgtcgggcctgtgggatgaatataaggaaatccagggtgaactcactgtggatggtcacccactgctagatgtgatggcacagcgaccacaggatattctcttctgcggttagtcatcgtttgatgtttgtcgttttgaacacacactgaccgacatgtcttccttagccgagtctgatgaccattttcccacgttgactgtggcggagaccctacgctttgcgaccagagcacgatgcggccccgaagtctcggccactaaaattgacacgatggttgctcagctagccaagctagttggtcttgaaaccgtcttgaatacgaaagtgggagatgcgaagatacgaggagtcagcggcggagagcgacggcgagtgtctttggcggaggccctggccacttgtgcccagtaagtgatatcttctgctcattcaagtaccaaactagcgattcctcgactcacacatccttacagtctgatttgcctggataatccaacacaaggactggactcatccactgcggtcgaattcatggaaatgatgcgtgagtggacgacacaaagtcgatgtgtggccgcgatgagcgtctaccaagccagtgatgcaattgtctcctattttgacaaagtcctggtgatcaactctggccgtcagatcttctatggccgtgtacaggaagcgaaggcatattttgaagatctcgggtttgagtgtttatcgaccaccaccgtcgctgacttccttaatgtgatgtccgctgatccagacgtgcgacgagcccaagaaggcagggagaaccaggtcccacgaacggcggaggagtttgagcgtgctttcagtgcgagtcctatctaccaggaaatgcaagtgtcggtacaagtggccaaggagcgttcccaagcccatcccagtccccttgtcaaaacatcggcctttgctctccccatctggcatcagatttggtactgtgccagtcgccaatttcgcatcgtcaccagtgattatagcttgtgggcggtggagctcgccacaatcgtcgttcaaagtctggtgttgggcacgctgttccgaaatcagcagcgaacgaccaattcattgttcattttcgcgtcttctttattctactctgtcttagtcccggcactgcagtccatggctgaatttggcaatggattcgctcagcgaccgctcatcctgaagcagaagcgataccagatctctcgcccgattgcatacgctctcggcttggtcaccacggatgttgtgtggaaggtggcagcgatctgttacaatatccccctgtacttcctgaccggatttcagcggacgcccggaaatttcttcacctggtttctgattatctaccttgagcatctcgccctgtctatgttctttcgctcggtggccatattttctcccaacatgcatcgggctgtgctgccggtggggattttctttaatatgtatgtcctctatacggggctttacgttcctgcaccacagatgcaggtatggcttgggtggctgcgatatctaaatgtcagtgggtatcatattatggggtttggacaaatgctaacatgtgacagcccttgtattatgcattcgagtccgttatggtgaatgaattcggagatctgagctatcagtgcagtatctcggatctggtcccatcagggccaggatataccgatatagcccaccaggtctgtaccgtggtgggatctcaacccggggatcgtcttctgtccggggattcgtacatccacgcccagtatggattcaaaacctcccacctctggcggaatgtagggattaacgcggccctattcgttttctttgccctttgttcagggtaagttatcagacgctcaagcctagttcatgagaaaaatctacgactgacactgggatttaacaggatcgggatggagatgctcagaacacccgcaggtcaactagccacagttttctacaagagcagctcacgaggaattcaccgccgcgataaaatcgataatgaaacaggatcagtccacggaaacgacattttggacgcatcggctggccaaggcaacgacgcaaatcggtcacaagcaagtcagagtaacgccctttcatggaccagtctctgtcttgacatcaaaaccagagatggcgatcagcgtctgcttaacaatctgagtggctcgatcaagagtggacaactcaaggctctaatgggggtctcgggtgccgggaagacaaccctgctgaacgcactggctggtcgttccaccattgggactctcacaggaactctggcgctcaatagtcaattgcttcccacgttcttccgaagtcgaatgggctacgtgcaacagcaggacattcatcttcctactcagacagtgcgcgaagcattgcaaatgacggcgcgacttcgacgcccagagtccatccctctggtggaaaaaaatgcctacgttgaaaaggtgattgagtggttgaatatggagcacattgcggatgccctagttggtgtccccggggccggcctcaatctcgaacaacggaagaaagtcagtattggcgtggagatggcatccaaaccagaaatcctattcctggatgaaccgacctcgggtctcgatggccaatccgcgatgctgatcgctcgcttgcttcgtcgtctggcagactcgggacaggccatcctgtgcacgatccatcaaccggcagcagagctcatcgaccagtttgacaagttgtatctgctgagccgcggagggaacttggtctatgatggtcctcttggaactcgctgccacgaggcaatcgagtatttccagtctcggagtcgcccctacggctcagaagagaacccggcagaatatttcctggaggttattggggctgggtctcgaaacgacgcccatatggattgggctagtctctggcatgacagccagcagggcaaggagcgagagaaggcagaacaaagtctggtccctgccgcagaacactccccaccgctggagcaacagtccctgtattcggtgccgttccatgtccagctgtgggtggtggttcagcgaacatggctttattattggagagaaccagattatgtcacatcgaagctctggatgagcgtcggaaactccctcctcaactccctcacctacttacagtctcccaacacagagcgaggggcatataatcgggtcttctctgctttcatgtctctcatcgtgggcccccctctagggcttcaggtgcaaccacgcttcgtgaccctgcgggatattttcgtccaccgagagcgagagagcttgacctatcactggctagcatttgtcttatctgcattcatcgtggaactacccttcacatttctcagctcgctagtctattggttgttgtggtacttccccgttggctatttctacgccccctcgcgcgcagggtacagttttctcatgtatgaactctttggagtctttgctactagcctagcccagctgtgcgcatcgctgatgcccaacatcgaggcagcctttgccgccaacggattcttcttcatgttttgtaacacctttgcggggacgctttctccaaagccagtgacaccctcgggttggcgctggttttacaatatctctcccctcttctatttgggcgagggtgtcaccgtggacgtgctacaagatttacccatccgatgcgagcagtcggaggtttcaatcttctacgcggcgaatggcacgacctgtggtcagtatgccaaggatttcctggaaattgctacgggatatttggttaatcccaccagcacggcggagtgtcaatattgccggtatcgcgacggacaatcatacgtaagtcctagtcaggagagagcaaggaaatggatctggtcttgaaactaatcatcagtagtaccaacaatacggctatgagtttgctcatcggcatcggaacattggcgttttcatcgggtttatcgcgttcaatttcacgatggttctggtgatgacctatcttaccaaaacacgccgccagtgatggaggatagattttggtctgctatggccacagtctcgaggaggggcatttgagttggggcaggttttcttgtttggcagtagaaaagtagaatagaaaagagaaatctaatttggatgagctgtttctcttcgaatcctttgcgtagcccactgctcggagtgtcatgttcttaattgtattaaactccaccttcctgctaacgtatatgattgacgtccaccacagctccgacttctcgatgatctttcttgatatagtcctttctccgtgcacaactgaattgggaaactaaattatacctgcacgaggaggcgcggcattactaccgcgacgagctagcttccttggccaatctagttttggaagttcaaccccgacttccccatggagtaagtcacaacggcatctcatatcaaggagccttggctacccagaccctaaccattgtggatcggcagatggcggggactggcttatgtgtatttagacaactatttcttcaggcaagttaaggttgtgagaatcttattctaactgatcggaaacccaatttttcctcactttgtatcattgcctttatttgacaatccaatccagcacaagatgaagctgtcagccgaggcaacggttatatctagagaagagggagctcagttgagctacgaagcctcatcctctcatcccagaaacatcaaagagcaagatttacagcctatccggcagattggcagtccagtaaggtgccctatcttcacactcgggattaaaacatcctctaactctccatggcttgctactagactgcgctgtgtatgggcacattcgcaattgccttcacaactctatcgatgagtctaatggagtggcgaagtagagctattaccaatgcctatattggtaactgctttttcacagcgggcttgggcttggtgctagtggcccagtgggagttcgtgcgcgggaattcctttggccatacggtctttggagggtttggtgagcatatcgttccatcattctgccgtctttcgtgtatcacgaccgatatctgattaacgtcgctcccttttccaggcttgttcaacttggctttgggggcaatcaatgcaccggcttttagggtggcggatgcctttgaagacgttcccgccgcgttgaataatgcaatttgatatttcatgctaggtcagtcaccttcctgtgggcggccctttcttttccttttcttttttttttagctggggtttaggctaatatgaagatatagtgtgggggatattcgttctattctttactgttgctgcaatgcctatgtcagtcgatgcacatatatatacagatacccagtctaaaaggtagtcgcagctaaccagagataggaacctggtatacacgggcatgctctgaacatcccaaacctcatacaccctgttggctgcatcgtactcctcgttggccgacgatcatgcatctactggagtcactctgaagaagactgcgggttcattcagatttgtctcgggcttgtttgcctggtacacggtcggccatctgatgtgtcaagacgcactgctattctcttttcccttgggggatacgagccccttgtatatgcgattgcggagacagagaaaaagctaggtgttaaattattaaggcgaagtggtcagatgatctagaaggcctgctgagtgtacgggaaatgagtgaactttaggggtgtcggtattgattcctctttacgaaagtgattatgagattcaatagaagctacctcgttgtggaatacattatcaggatataactcaactgcgtaagccaaatcaaactatttgcatgccggagattctgctatacggaagaagcaatcagggctatcgttgaaacaaccctaactccatgtgattaatgagagttaactgagtgtgaccaatcaaaagctcattatttatggaccaatcaagatgcattcgtatcattgcggagcgaagcaataaatcatgaaaccaattagccagtaacaggggggctttgtgcagcactagaagctagaatcagtcacttcgctctgcaacgattatctcgaatcacctcgtagatgtatttgtcttgggccccgtcgtggaactctataatagcctttttagaaattaagcttaacgagactacctataaatgagcacttgatgtatttacgtatctatatgacgctttgaccatctagggaccacctcattgtataccgtgttcacatggtgaattctccaagcttttggaagatttttgcctcatgagggtcgaatttcttggtcgagtgggcgtacatactcctgaccttcttcaagggatttctcgtctccttgggtgcttggatgttgacatccacgccgtaagttctatcacagtcgtagtgacagattaaccatggaaaattatacaacaaaagtactatacaaccattccaaggaccttctagggctgggagcttggaaatattctgattagaaattccagagtggatccatggatgccggcccagatggacccacttattaccctttttaggcacgccatctccgtcaaatgattaggtgagctcgggaattcccgaagtcccactcggattccaaaaggagattcggagtttgtcagtcaaatggtaacctgtgattggtcagataccaaactgacaaagatgaatgtcccaaaggagtaatctattgtcaccaaaatgtcctcttccagcactgctcgcatttaaataactagctagggtcaggcaatatggatattgatacgtacgtcaacctcctccactggatatctatattcctaccttccattttcagcttagtacgactccattgggtagtggtacctggataactagctcgactttcaaacggctgactaagtggcactcgcttttcaccatgagtgtagacaatccgacgccgagtgatagcgtgctcgaaagccaaaccccagatcgtgtggacgaatcaatcatcaaagctgcggatgccgagaaggacgcagccccacgccgagaaattgtaggcctccgctggctgctcgtctgcattgttgttttctcagccaatctgctctatggtttggacaataccatcgtggcagacatccagggtcccattgcgggtgactttgatgaatacacgcggctgggctggctcggggtgggcttcactttgggatcggtggttttcattctcccactgggaaaagcttacgccatcttcgacacgaaacggctctttctcggttgtttgactatgtttgcggccggtagtgccctctgcggtgctgcccccagtatgaatgccatcattgtcgggcgtgtgtgggcgggagccggaggagcgggcatgtatctggggtaagttgtaccacgacgggcagagtgcagagagagaagactaaccatgacaacctaggaatctgaatctcattactatcctgaccacccctacggagcagcctgtgtatgtgggtctggttggattgatctacggcaccggctgtattctgggtcccatcattggcggtgctttttccgatagttcagctacttggcgatgggtacgtgtggtctctttctagtttcctcagcgagtgtgctaaccgtaatgaatagtcattttatctcaatctggtcattttcggagtcatgtcgcccatctatgttttcctcctgccttccttgccacgtccagcgggcgaaggccgcagcttcatcaagaagcttgtggagctggactgggtgggaactgtcctgtccgcgggcatgcacatctccattatcttgttcatcgtatttggtggtgtcgaatggtcctggacggatgggcggaatatcgcgctgtacgtggtctccgctgtctgcactattgccttcgtgctcagccagtactattgtgtggggaccgacaaacaaaaccgactgttcccctgcgagttcttgcggaaccctacaatgctcctcctttacgtcataatggcctgtggcggtgcctcgctcttcgtggcggtttactatatcccactttacttccagttcgtccagggtgactccggcatcatgtccgcggtgcggctgttgccgttcgtctgcttctacgtggctacaattctgctttgtggttgggtcatgcccaagactggcttcttcatcctctggtacctggtcagcggcatctttattctcattggagccgtgttgatgtacactgtgaaattgggtaccagtccctccagcatctacgggtactctatcctgatggggttgggcatgaccaccacgcaggccgcctatgcggttggaccgaccattgtgagccccgatcgggtggccgagtgcctccagttcatgaacatcggccagggccagagtcaactgttgggattggctattgcaagtgccattttccagagtaagaccctcaccgggcttactaccctcttgggaaacaaaggatattcacatgcggacatccagggtgcggttgctggcgctcagagtaccctgatggagcggctgccccaggccttgaagacagaagctctggaagtgattgtgaattcgattagtgatgtctacgtgatggcgatttcggcgggggctctctacgtggttgcatcatgtctgttgcctcgccgtcggttctagaatctttcgcaaggagggagagcagcgagtgttgacgggatactggctttgtatctgtgattggggtgtcttagataatggagttttattttctcattcatttcctcgagcgcgaggtaagcctctaggagtgtcctccgctcttctagtttctagatcatcataatatagagcttgtgggttgaaaatctctcctggaaatagactagaatatagcagataagaagcttccgcgactcggatacagcagacaaagccttcttctagtcgataagtgttgcaagtcatctccatttgtcattgggacatagcaatttaccaatatagtagtctccggaactccgactccgcatcccacctagtactagtagagagataaaagacatatccggccttggccaagtaacttgcctccttcagctgtggtgaccctgtaattgaacttgcgcagtggtaattatatcatctatctcatcttctagaattggcgttgatatagtagtatagcatgaaggttttcgaacagccctctaaaaattgtccgcactgtagctatacgaaaatccttctgtattcattgtagaagatatatctattttagtacgtaaagtactggtggtgagcatgaaattaccctatctgcttcgagagtcaagaagccgatgattggccgtatgtaccttttatatgtaaatccctaagaaaaggtacaattacccaccaagcattacggcgtggtgaccttacccccctttagccggggcctatatatatctagtctttctcttcccatgccatcttctctgatgttgtagaaaataaagtcttatttcacacagctatctattattcagtcaaagtacacgccatggccaccactcttcccagcacctacaagcaagcaagcttcaaggaaaaagatgccagactgactctagaacaagtcccattgactctgcccaaacgtaacgagattctgatcaaagtgcaagcctgtggcgtgtgtcattcggaccactttgccgagacgaatctcatgggaggaggattgtgagctatcccactatggaatccatggaattccgactaatttccggttcttttatagtcctatcgttcccggccatgagatcattgggcgcgtagctgcaattggagcggacgagaccatctggaaggtaggggatcggattgggggcacatggcatggcgggcacgatggtatgtatctctattatctccccaaaaagcctggttcccctaataagactatactaatgcactgaataggtacctgtgcggcatgcaaaagaggttactttcagatgtgcgatcatcaggaaatcaacgggatttcacgaaatggcggctgtatatcccctttctcttttcatcatcactctttcgtcattccaacggaataatattaagctcacactccggtagatggcgaatattgcatcatccgtcgcgaagctgccgtccgaatttccgacgaggtcaacgctgcccaatacgcgcccctgctctgtgctggcgtaagtgtcttcaattcgatgcgccacatgagcatcccaccgggtgggctggtcgcaatccagggtctgggcgggctcggccatctagcgatccagtttgcgaacaaacttagctatcgcgttgtggcactctcgcgggattccaagaaagaggaactcgtgcggaagttgggcgcgcatgagtatattgacacgagtcgggaggatgctgtcgccgcattgcagagaatgggcggcgcttccctgattttgtctacggcgcctgtgccggagataattaacccgctgatcgaagggcttggtgtgatggggaggttgttgattatgtccagtaagcttctttaaggccgtttcaaggcgtttggttggatgctgataaatatagttgttcctggtattgaggtcagcactggcatgttggtgagtgagattttcctctgcttctctgaaaaccagacagaaagagaaaacagaagagatgcgatcaagatattaaccccagtttaggtcggaaagggtaaatccatctggagttggcctagcggccatgccatcgactgtgaggacgccatcgcatttgcggaggtacatgacatccactgtatggtagaagagttccccttagaacggtgcaacgaggcatttggtatgatatctccttcacttcttgggttcattttctctgacctgttgtccttcctacagaggctatgatggagggaaaggtgcggttccgcgccgttctcaccatggagtaatgagtctgaggacatattgaggggctaccaagtgcaccaagcagcgagaagagggagagagagtttaaattcctatccagggcagggcccggctcagtctgcactgggggtgtggtacccaagttgcggcctaaaggctcaatttccaacaggatattagggatgatttccattatacttgccagatagtatttacgaaaggcagagtatgaaagttgcgataaattgagtgtttgagtatttacttctccttcgcgctatgttccacgtaatattcttcatcttccctcgtagtcgccccttaacagttgcctaaaatgtcgcacgcgatcttctctgccagtgcatctacttagggttagagattttgtttgaagactatatactatatattataggacagaggcttacaaattgtggattggggatctggtggtaggaacggcaaggccgaggcatccactactcgcagggcgtcaacgccaatgactcgagctttggagtctaccactgcctgagtatcatttgccaaacccatagcgcatgtacaggaggcgtggaagatggtgtccaagctcctccggacatgatccagaatttgcttatccgtagtagcaccaaagtgttttattccaatccgcagggcggtatcgccaatgcctagttgagatccagcactatgaaggacacagtgtcggtggacgatcatcatccccaaggagtttggagtttcgggatatttcctttttcggaaggacccagataggagaatacgcgccgatgaatcaatttcaccctttggcaagacgcacatgcacgtgcatattctataagtatactgtgcagacatcctgttaattgtatatccgttatactcctcgctctcggtctctcccggagtcttccgcaatccctgcaggccttacgtagtaccgcgttcggaggtcctgcactggtatctaatcagagtagtgtggtcactgtatgcaagggaggaataaacagccagctagtcagtcgaatatagaatgattgctagagatctgtatttgagggggaaaagcccatcaataagcgttggtttgccaaacggatactctggtctctaagtgctactccaataccatccatcatggcgaaaattgatgtgcaccatcatttctatcctctggcaatgcgccaaggtcagtcccacgcatgttagagttagagtgagaagcctattggctaacctcatatagccctggatcgcgcaggaggtgatccctcgggctggtacactcccccctggacgctggagctagaccaagacatggcgcgacgaatgaaggttaccaccaccattctctccgtcactgcaccggggccatgcatcgagcctgattttgttaaaggagccgccctagcgcgcagctgcaatgaatctgcggccgccattagggactctcagccgcacaagtatggcttctttgcctcggtcccctctctgttcgatatggcggcggtcttgaaggaaatcgactacgcctacaccactctccgtaccgacggagtcactctgttcacccgctacggcgatggtcccaattacctgggtcatgtagcctttcggcccatctgggctgatcttagccgtcgcgatgccgtggtcttcatccacccaacccatccggtcgatacgcagctcgtcagtcaatggctaccgcagcccatgtttgactatccacacgaaacgggccgggccgctatggatctgctgactagtggcattttgcaagactatccgggttgcaaaatcatactctcccacgcgggcggaaccttgccgtatttgatctaccgggcggctaccatgctgccgttgatgccacgcactcttggtctttcaactgaagagctggtggcagctgctcggaccttctacttcgacacagccatctcatcaaacccggtcacgttgaaggcgctgttcgagtttgccgcacccggccatgtcctcttcggcagtgacttccctaatgccccgcatgatgcgatccaacgctttacggattttctcgaggcgtatgagctgccggaggagaccaagcaacaggtaaatagcggggcggcattagagttatttccacgattgaagaggatcccggataaagcgagactctgaaatggggtaggatcaatatggtagctgtacataagaagctattggtagggggttggagtcaaggctgatgagacaatgttgccgatgacctaatgattatttacatatcgcgatatgactttagtagtagaagtattggcaatacattatacaaattgcaatcgatggacctatcagtttccggtctgtttgtctctaaataataaactgggactttgttggcgttactcagagcaagcatagcttctctctccgaaaaacttggtaatgttctacctatcatccagattatccaactcggccattttccctcctcgatgaagcggtcgttcttttggggttctatatcaagcatagatgctccccatcagatgggtctggaagagccctctgtaggatatcatatattttcgttttatggtgagcagactgaactcactgtcgactctacaggaagagggaagtgtttccccaaggggaatcttagccggatgacacactcctttgggtaactgggtaactgggtttcttgaggattgcaagaaatctgcctatgcatcaacccctctccttgtcgatctataagtaagcgtacatatagttacccctcatctcgacgaagaaattcaacctgaaggattcagcccggatagatctcatcaactatcaactatggaaccactattgctgctactcctggtcttattaccagccatcgtagtcgtacgatatgccttcacctatggtcatcgtaccagcactatgcccatcggtgagttgtcgtcttcaatgttgactcagtgcggattttgctcatctggcataggtccacccaccctacccttcattggaaacatccaccagatcactaagaagtacactcatatcaagtatgtttgataacctccattttccctttggagcacacagaggagattctcaccgccgatgtcttgcggaattcaggttcaccgaatgggccgctcagtatggagggttatatatgctcaagatcgggaatggcaatatggccgttatcacaaatcgccgactggtcaaagaagtcgtcgatcgcaagagcggtatctacagccatcggcctcattcctttgtcgcgcacgatctcatcaccaaaggcaaccacctattggtcatgcactatggcgaccagtggcgcaccttccggcgactggttcaccaacacctgatggagtccatggtggaaagcaaccacacccagattgtcaacgccgaagccatacaactggtacgagactatatgatcgacccggagcaccatatggcccatcccaagcgatacagtaacagtatcaccaactcgatcggtaagtctcccatctactatttattgctggaagctcctaagtccctgtcacagtattcggaatccgcacggccaaccgggaaggatccaacatggggaggctttacaaactcatggaggaatggtcggaaatgatggaaacgggcgcaacaccaccagtagacctattcccctggttgaaactactaccacagtggttttttaacaactatattacccgggccaaggccatcggcgtgcagatggaaaccctctatgtcgacatcctgaacaaagtgataaaacggcgggaagatggcgacaataagggcactttcatggacaaggttctggatagccaagagaaacataatcttccctggcatcagctggcctttatcggcggtgtcttgatggaaggaggctcggacacaagctccagtctcacactggctatcgtgcaagcattggtccaaaaccccgatgtgcagcgaaaggcacatgctgagattgatgcggtggtcggccacaaccggtcacctgtttgggaagattttgaacaacttccttatatcaacatgatcgtcaaagaaggtcaccggtggaggccaatacttccactttgtttcccgcatgcactgggagagggtaggcctcttttctcttactttctgtccttttctgtcctttctaacttctatactaactatgggtatccttatagatgactgggtcgatggcaaattcctccctaaaggcacaatagtcgttatcaacacctggggtatccacatggatccatttcaacctgatgacccagctgctttcatccccgaacgctttgccaaacatcctcaattggctcccgactatgtgccggggacatgggagcgtcgcgaccactatggctacggggttggacgccggatctgtcctggcattcacctcgctgagcgcaacatgttcctggccattgctaaactgctatgggcgtttgacttccagccgggagagggcccgatggatagtgatccggttaatggataccataatggcttcctttactgtgccaaagactatccttgtcgacctgtagtacgcaacgaggtcattcgggctacgattgaaagagaatttgggattgcgactgtggatgtgttttctcggtttactgagggatagttgaaaattgagaggcgggatggccgcattcaaattatttttggagctgtgatgagcgacgagaatgagttgacgttcttttttctcgttttctgatcatttttgttttcaggtgctctctactatactaggtctataactttcaggcctagattctcacatcatcaacacagtgtttctaggctttcagcaacgtcaatccatttgtaaaaggtccactatatatccgcggcgagcatcccctaccaatatgggaaaggacttccaaaaaaaaaagatttctcggtgcccccttcatgggaactatgatgaattggcttgctacttagatacaaaaattattacactgatacctcatttgagatgccgtcaaactccagcccgtcctcttgatcagtacgttctatcgtcatcagatgctcccaatgctcgggatacttctgactcgcccatttctccacttcatctttccagtattggtacgggatggcgttgtagaataacccgatactaggacagatattagcgatgataacacagatagcaaaggaatttactcacgtattgctggtaggagggatcccgatctcagcttccatgttgtcgatagcttcaacagccaggtcaaattcgcattgagctgccaaggcctccatatacgccgaatagagcgggcgattcgcagtgatctccagtttcttgaccttgctcatcatctttatagcctcctgggtaccattgtgatgattctcacagaccttgaagaaaatcgtgatagtcttgtgacaagggccttcctccgactgaagaatctgtcggaagatttccatgctcttttctggcatctcgcatgcagcatacgccatcatcaaaccatttaggattctcgtgttgagatccacctcaagatcaagctttagcatgttgtgtacaagctttagattggttgcatctgccgtgcgagccaggccctggaaacagcgggcataagtgtctggcctagggcgtcgaccaggttcatcggcctgacgcatatgtccaaataccaagacggcaagatcactgcgcttccggttgaagaaggaggtcatgattttggtgcgagctgagacccacgtttccgggaatgcgatcttcagaagctcgtatgcattccacacgtcggtgtcggactggcttttatccgtaatgtactctgtgagggcgtcccgtaccggcatcttttgttcatcgctgtagctgcctagtcgtggacgtagcaactctgaaacggcgtcgaggtcgtggcgataaaggagcatgtgagtcaatgcggcaatggtcgcagactctaggcgcacgttctcttggaaaagcgggtctaggagggaggatatctggtcgaacaaggcatccttttcttcggatcggcagagcatcgcgatgagcttgtttgcgattggcaggttgtgactcgtgagggaagtcgtgtcaaccttctcttcgagaatcttcaatgtctcatcgacatcgccggcctgtatacaggactccaattctaagatatgagtttgactatctgggacaagaccccattgacctgcgagtcccatgaaatcagaagccaactgcgggttctgcgttgcgttcgcgtactgaataaggttattaacaatgtgaatgttgatggagccctcaagctgcggattcttcgtagtccatgaatggactctttgcgcaagagcagaagcattgttcccctttgctgcttcccagagcaagattatgccaacggtgtcttcgctgggctcattagggagggacttgaagatctcctctgctgaatctgcccgcgaattcaagagataatatttgatgagagcctctctcgcagccatggagggttccgagccatcagcaatcggagagtcgtagacagtttgggccgctttccattgaccgtggtcgacgagaaatgtaactagctctccatgcgaggcttgatcaaatttattgccatggtttccccactcatcaacaatcttccgcacctgtcgcagatcgtccttcatggcaaaccctttcataattgtgagccatggcgacgggacagccttgctcatttgaccccagaacttcaatagggtatgtctagcatcctcgggattaccattcatagccaatatattgatatagagaccaagggccggccggctgatcttccccggaccaaatccatgatcgaggtttagttcttgatatgcatatcgggcaaggttcatgacaacatcacgagcctgtgggacacactctgactcggagagtacatccaacaacttttccaaattctcaatcgagaaaacattctgccagtcttcttcttccatctcgccctgcagggcccttaaatgtttgaaggtgacgatcagcgcgcgggcttggaaatggctgatgagcattggcgtttcaagccgcatggtaaaaaacgtttggaatgccttcgcaagaatatcactcggaggagttctgcttcgatctttgagtgccctcatcaagtcagccattggtttcaggcccttttcggagggcaaaatagattgcgaccgctcagggtccgagctgaagacaaagatgttgcgtcgcgaggtataaggaaggctggacatggcaggtcgtactcgggcaggagtgattgtgtgcaataagcgatttcgatggcattgggagaaccgaagtggttcattgttaatgattgcccggaagacccgtcttgtgagatgggattgcattatggattatgtgagctgagcttatagcccagatagaacaagatgaattggataaaaacgtgtagtccgaagttgactcgcaatctgcatggaatcgtgaaaaatgggggttcgcgacgcggagagatttggaggcggaagaagtcttggcgaaaaagatctcatctccgcgttgcccggtctccctaacaccgtcttcaacatcgacaactaatcagggattgaaaggtcaagatgtctttgaacctcttttcttcaccgtcattgctgcgcaatgtcgcggccacagccaatgttggcctgtcgctctgtcgctggagctcgaccgctgctatgagcgctttcacttctcagcgcgccacaagctcacagagtatgtgatcaacccgatacaccgagcttattcatttttgtccattctataatttgggaacacatttatttttgggtttgcctagcgactaatgtattgcgatagcctcccaaatcgtccaacgacgccgtttacctagtcgtctgaagttcctcgaggaccagaaggcgcaaggcgagagccgagcccttgagagatatcaaacccgtgacttcaaggctggagatatctacgccccgcacgatctcagcccggccgagatgaagaaatggggaaagcgccagtcccctcagacagatgctttcgatgcattgaacgtgaatcctatagatttgtacaaggtatgcattcctcgagccaatggagctatatggaggatataccatcatgaacagccactaactgttcgctcttttgccattacagaacttctccgtcatgtccgaatatatgaccagcatgggccgtatcaagccccgagccattaccggtcttcgacctgtcaaccagcgcaaaattgccaaggcactccggagagccatcggcatgggccttatgcctagtgttcaccgacaccccgaaattctcgcagccgagatgcgagcacgcatggagggccctggaggtttctaagccgaacatactactttggagtcattttttgggatctgaaacaaatattgggagatttccttgtacaagtacaggccggtggctggtagaaagggcacgacttggtgtattattactcttagcgctatgcattgattttattgagagctactactttcaagttcttttgtgctagaatatttgaagctatcagatacattgcagatgtgttgacagtgatatttctcttttctgcatactcccaatgcttgttttaagtagacaaggcgtggcggtgttccccgctattgtggcccgtacgtcagtcgataaacagtggactgtggactctcctctgctttcccccaactcctctgcttgagtgtgtacatcttagcaatgtcacttacaaatggtgagaacctgtcaccctcatattatatattattgtcctgacatattccaagagtccatttgggccgctagcccctccaccacccgcggccagcccactcagctttcttctgatgctaaaggcgagcgattggcatatgcagtatgttattctaacaatatctacaatagtacactgcctcgtcctgacatcagcgattatagtccaacaaatccatcttcctacgttcgatcgatgaccccgcagtcgctaggcagtacaccgaacacaaggcgcagacaactgtcgcacgcttctccccctccggcttctacgttgcaagtggtgacgcagctggaatagtgagagtatgggattgtgtcggtgaaggaatcaccaagggtgaatatagcattgttaatggtcgaatcaacgatttggcctgggacggtgactcccaacgcattattgctgtcggcgatggtaagcagcgatatggacactgtatcacttgggatagtggaaataccgttggggagatccacggccatacgcaacagctcaacaccgtgtcaattaggcagcagcggcctctgcgtgccgccactgctggtgacgataagaagacggtattctaccatggaccgccgttcaaattcaacaacggaattgctgataagcactcaaactacatatacggagttgcctttagcccggatggttcgcacttagtcagtgttggcgcagaccggaagatctggctctacgacggcaagacgggcgagaccaagggtcagatcggtgaaggagaacacactggcagtatctttagtgtgtgctgggccaaggattctcgaaagttcgttactgccagcgcagaccggaccgtcaggatctgggatgtggaagctggcaaatcaacccagacctggaccttgggagaggagggtgctatggctgttcgtgaccaccaagttggcgtggtctggcccccaggaagaactgataacctgctcataagtttgtccctcagcggagacttgaactacctggtcgagggaactcctgagccccgacaggttatctcgggccaccagaagagcatcacctccctggcacagaccactgtggataacaaggaaactctgtggacaggcagctttgacggaagagtctgcaactgggatgtggcttcaggtaaggccgaggagattgaaggagatgcccaccccggttacgtcgccgggcttgcaaccacatcagagggaagcggtagaatttacagtgtcggctgggacgacaccctccgttctgttgacgctgctgctaaaacatatacgggcagcgcttcaaagctcaatggacagccaaagggtgttgcggctggtgacacgaccgtgcttgttggcgaagccgaaaccgtcgagattttccaagatggcaagaagaccggagaatacaaaacagactttaccgctacaaccgtggccgcgcatggttctcaggcagctgttggaggcgagaatggatctgttcagatctgtgctatttcgagctctcggctttctccccgggcagacattaatgcctctcgcaatccaatctctgctcttgccttctccccagacgcctcccacttagctgtgggcgacttgcggggacgtgttctagttttcaaggttgcagatggcagtctagttacagaccgttggacggcgcatactgcacggatcacctcacttgcttggaatgaggctggttcacacgttgtgagtggatcactggacacaaacatctttgtttggagcttggctaagccaggcgactggcttgagctgcagaatgctcacaaagagggtgtccacggtgtaggctggatttcaggaggctccaagatcatctcagctggtgctgatgcagcggtgaaggtgtggaaagtagatgggttgcaataattatgaagtactccgtagctgtcacagtattttcctacgaaattataaacgtcgagagcttctctttgttgacaaacacattcgaaattagcatcgagtctattaatatcagaaatgcattctcgtaactcaagtaactcaagtcccccgaattgtacacaaagcaaaaagcaaaacaaagaggtgcgtggcaatgggaagtggggagtgactgtaactgtcccagccagccaacaaattgacctgcatagctcctggcacctccccacaaccgtctgacgtcttcataaagcctggatagaagggcgacttgtcgaagatgtgccatggggcttgtacaacgccctaagtccccgcgaagtacgtgaaacccgaaagatgccatctggaactcccagcagctcccgacgttcgcgcccaacggtatgtgctcgcagtttttgacttggaagatactaatcgtcggtgaagctccgtcaggctacatttgtcctcccaaaaacaggccagcgcctgaaaggcctcatcaacctccgaaactccacgcctgacaacaatgaggaaaggcgcgggctcctcacaaacgagatccaacattatgagggctacctcgacgccctcacgcggcgtatacgtgataaatggacgcagacaaatcagtttgttaggtcggaaccgggtattggagtcttgaagtacagtcttgcgtatctggtcggatctctggcaacttttatccccgcggtctcggccatgctgggccatcaggatggaaaacacatggtggctacggtgacggtctactttcaccctgccagatcccagggtgcgatgttcaaggcctcgatctgcgctttcctggcgttctgctattctaccttcttgactattaccagcatgttcgtggagatgtttttccaggacacattggaattgcctgcccttggtcatgctgtggtcctgatagtattctgtggcggtgggcttggctttgtcggttggaccaagcaacgactgggagatcctctggtgaatgttgcctgttcactcacggctctgtcaacaatcacccttttaaccaaggagggttctgtacaaagcggtgatttgtctctttccaagatcttccaagtcctaaagatggtcgtgatgggcgtggtggctgtcatgcttgtatcctttttggtcttccccatatcagcgcgtaaaaagctgcgctcaaacctcgtcaccgtcaccgatacattggctatcatgatggcacttatcacagaaagcttcttgagcggatctgaggaagtgcttctctcggctgaattcgttgacgcagaggcgaagcaccgcaaggcctacagccagctcgacaggctcgtccgagaggctaaacttgagcactttgtggcaggcactgaaaaggagtacaggctcgaaaagaatctcgtccgttgggtgcaagatattacccataacatgggaggtttgcgtaatgcagcttctctccaattcagtttgattcgtgagactattgcccatgactctgtgtctccggaagatcagcaaggtagctcgactcatgtggactatttcatgaccctggagcggtcctggtcatttcccgaagggtcctttctggagcctattgttgagcgaccagaggaggaactatctccagtcagctcccatcaacttggaagtactgaatcaacacccagacccacgcttcttccagcagatgtcttcactgtattcatctctcatcttggccctgcaatggtaagttgggactcaagaagtatttgatataattcaagactaactagaagcagcgatcgttggctttcacattgaaagaaatctttaaggagattccatttgggcctgcaccggactataaggtctcagtgaatggtcgactgcgaattagtcttgaccgagcgcttgatctttacaaagaatctcgcgagaagacactcgcaaccttgtatcaacaaaaggaaaccatgaaattgaagtcccgtgaagctgaagccgatcttgaggaagtgtcagctagctgtggccatttcagcttttcgctcctcgaatttggggagcagctccgagagatgctttctatcttggatgagttgcagttggaagtcgaagagcggcccaatgggcgaacctggtcgtggcttaaagtttggcggtggtcgagaaacgcggaggccgctaaaatagcctcatttgacgatggtacgtatgcatacaaatcgttgagacatggattatatattaattctctgcagagacagcttccaatccaaccggtactgggcaggactcccataaacatgctaggcatgcgtcagacggcttgattgcacatgatacactctctgtcaatgtccaaacacgaaaaggcccttcggcgaatgaaacaacaaagcaaaggctcggttaccgtttatggaaatgtcttggattcttccgacgagatgatacgaaatacgcgatcaaggttggggcaggagctgcactctatgccctacctgcttttcttccttcaactcgcccgttctatgggcgttggcggggagaatggggtctgctgtcctatatgctggtttgctcgatgactatcggggcctcgaatacgacggggtatgcccggtttctcggtacttgtttaggggcagtcgccgctatcctagcatggaatatcaccgctggaaatgtatttgctcttgcattcttgggatggataatggctgtctggactggatacatcactattgttcgtgggaatggacccatgggccggtttatcatgctcacttacaacctctctgtgctctacggctattccctttctcggaaacaagcaaatctggacgaagatgaaggcggttctcatccaatcatggccgagattgcactccatcgagttgttgctgtgttgtctgggtgcatttggggaatcatcatcactcgaatgatttggcccatcagcgcaagaagtaggctcaaggagagcctaagtcttctctggctgcacctgagcctggtctggaaacgcgatcccctatccatcatggccaaaggcaaaaagtctgttttatacatgacgccccgagagaagcttgagattgaacgatttttgtctcggttggaatctctccaggctgcggcaggctccgagtttgaactgaagagtgcattccctgaagcctcatatgccaacattgttcgccgtacacgcagcatggtgaattctttccttaccatgaacatcgagctgatgaagaataatgtggccactgaaggtgaaatcagccttcttcaatacacaaaatcagaacggctgcagctatctgctcgggtgagccatctattatcaggtcagtcctcttgtaacttccttgtgcacttgatgcggcgctgattatcttccagtgattgcttcttcgatgaaactcgagtaccctatgagtgatgtccttcctagcattgagcatgctagagaccgattgcttgctcgcatctatcgctatcgcctggatcatgaagcatctcaacagactaccgatgaggactgtgctttgctttatgcatacagtgagtatctctttggtttctcgtcccttccaccagttcaatacactgacccttgtccttctagttttggtgacaggccaattatcgaatgaaatcacggagatcattgcagagatcggacaactgtttggggtattaagtgaagatgtagtgcagctatcttgaaaatctagctgatcaatttgaaaagccctcaaaataacaatgtagagaaatatatgtaaacatacaaggcaacactgctaagtttggcgcacatcgatgtatccgtttttggcgtctggcggggaaccgcaagtcggaacctccccttccactcaaacccatcgccatctctttcattccatcaattttcatcttcaattcatcaggttgtctcatgaaaacatactctcttcccctatttctagtttgaaccctagaatcctccttaatgaaggcgtaggtgccaatattccctgcccttcggcgtcgcccgtcgcgccctcgcgagttcagcaaccatgcagattgatccggcggctctgagtcggagtgactctgtctcaaatccaaagggcaccgtgcccaatggctcagtatctgcgaagacctccagagctctgatatcggtgccgcgactagagctcgagcatgcctacacggacctgaaggccgccatcggagacaagtgggccgaatataaggagtctacagctctgttcttactaggtatgtcgtgatgcgcatggggtttctagttaaatggcgattgcttgcgctccgcggagagtgtttctcccttccctcctatgtattggcctctgttcgatcacctcctaacttcttgcctgatgataggacactacaaccagcgcgaatactcctcacgcgtcgattacttcttgtgcgccgatcctaaaaacgagcatctacataacaatttcgtatgcgcgctcatcggaaacctcacgcgagacctccccgatcacggcgtcgcaaactgggtatcggccaacgacaaaccatccacggtgtcgaaacccgtctccggagatgctgcggaacaaagattgaagacggaggttatgaaactacctccgagggaccgtcggcgcataaagggaatcccagaggtgcgtagtcgcaaacgatgactaacaccttcacccaagaacccgacagctaacgatcaccagcgagatcccaatgagaaggtgcttacagagcttgaagaaagctatttagctaagcaattcaaattacccagccaggttcccgcaagtgcaggcggcttgaacaaaactagtacggcaacactctctccgttcctatggtcaattcaggaaataatccctaaccatctttctccattacagactgggagctggaaatccgaaaacgatatgcccagccgctagccgcagaaacaggcgaattccccgatgccgaatccatccatgcccgcatggtcccgatatgttacgaagaatctctccccagcggtgctgcgctcccatgtgctgagttcatggcaattgcgacggaaactttcgtaaaggaagtcttgtccgcagtattctcgcgcacccgttcaaatggcccatccggtacaatcaataacatgatgatgcgtcaataccgacaccaactagaagttgaagagcttgcatacacacgtggggagatttcgaaggattccgccacaggcctactccccgttgaagcgagagaggccaacctccgaaaacccttaggcgttagagacctgcggttaactctggagctgggcggcggtgtcctcggccacatgccgctgattgtagaccagatcatgaacagttacttcgaagacgaactcgagaccgaaagacacgatcgaatggagaatggcgctggtgaaccgcatcaagaaatcaaacccgaagacgagatggacctggacgaagacgaagctgaagacggttctctgctagactgggaaggcggcacgcttggtgatcgagctcagttgagctctttgctcgacgagtgtctgtccatggctgcatgagaattttatacccccaatgtctttttttccccgtttcatacatgctacattacatgctttttctgttcttctttttttttttttttggcttcactcacgatttggatggtggctcacggcgtctgggtactaccaagggaggctgtcactgtttgtggcgccacattatttgcatatggatttggagtttgaagatatattgtcttatccgttctcgaccgcccctgccttgtcctctatattcaccttcctattttggtcatgtacagtatcacttctcaaggacaaggtcaagcggtcgatatctggaggattgaaggaaacctcgaaaacaaagagacgtaaaaaaaagctgaatggccatgacctctgttgggaagaggaggtcttgttcgatacccatgaattctactttacaacttggttatcttgagaagttattacatatttttacattaggaccctgaacttcttgacgtgagtcttagcaaagacagacccctgtcaaagatgaattccatgggctttttgcccccgagacgcctgtagatagtacaccagaagactgtgctagctagttgatgatattcgcgacaagcttcagaagctcctcggtagtcttgtaggcattggccgggtccttcgcgatggactgccagatctcaccgtgcttgggttccatcgacatgcacttcgacacgacgtctgctcgtttttcctgtaactagatgtcagctggatattccaatgataacgataacacagagcccaaagagtgaatgaatgaaaaggggagagagaaactaacctcggtaccatgctgcataaggaacttgtaataccaagcccagccatcaccgtaatcactatccaagacgatcgccttctcaaaccaggtcatggccttctccagccgacgctcgccccagaagatacgcgcaacagtgatgaacagaatcgggtcgctctcgaccttcttgatagcctccagactgcgtgccttgcgctgagcgcggggctcgagataccagatgctttcgctccacagaagccccgatgttgggacgtcctggatcgcgcgcgccatgaggactctggcctgggagatgttgttggcgcgacgttcaacgcgcacactttcggtccaaagctctgcgttcttgggaacggccaagcgggcccggtcgaggacggatcgggctcggaccacggcacccgctttctcttccagtcgcgaggcaagtagccacagcgcaacggacttggggcaggcgcgggtgcctgttccgtatgcctcgcgcgcctgcgggagcttgttttgcgcttcatagatttggcccttgatcatccagagcttgtcggccttcgggaagagttgcagaccttggttgactagatcaagagcgtcgtcgatgttgccgagctgccgctcgaaagcaacgctcttggtccacacgcgatctgtgccagcttcacggcgggcggtggccaggagctctcgggcttggtctggctttttggcgtccgcttctagcttaacagcagcaagccagatatcttcattgttagggttttggttgaaggcacggcccaagactcgtcgagcatcgtcaatatctccagattgccatttctccttggcaaggaggagccagagctcctcgctttgagggcatgcttcgactgccttctcgaggacctgccagagagcttctttggtgccgtggttgcgctcgaggtccgctgctgcgagccagattgatcgacgattcacaaagactcgcagggcgtaagcgtaaattgcccgggcagtttcgtagttaccacgggcaatactggccttcgcgtcgtccatccagatatcttttcggtcatcatcctcatccaggccccatccgagagtctcttggatgatactaccacatgtaagaacggcgccttcgctttcgcatttctcggcttctgtgatccattcctctctctttagcatagcgttctctcggaccagggactgaatagcacgcttcatgacattgaccctagcgaatgtacccatctgttcctggagtcgagctgcagcaatccagatttcgtagctggtaggaacggccttgcgagcagcgttcaagactttttgggcattttctggggtttcaagacgagcaagggcaagccacaactcgactgagagaggaatgatttcaacggcctttgccagcagcaagcgcgcatcggcaggatcgtcttctaggttgacagcttctttccaaatctgcaccgattggggaatgtgtagaatagcttgtcgcagaacattctttttggcacgggtgtccgtttctaatctcatggcctcggtccaaagtcttgtggaacggtcattgcttttaattgcattcgctgcaatgatctttgcgttatggccttcattgagtcgaatgttttccagccatgcgtcttcacttttggggcagagctcgcaccctttcgcgattaggttcctagctgccacagtccggccagcaagctcctctagacgagctagcgcaatccaaccgggagcatgtttaggattggtcttggtaactgactctaacaaggtacgaactcgcttgatatcgcccacctcaacttcaccagctttggcttctgattgtgtcaagctggtgagataacccttcgggtcgatattcgtagaggttccggatgcagcctggtcaagtcggaccttcagcactttatcacgcgccgcaccgatatctgcgaagttcatcatgttactgtcggcgttttctccttcgtcgacagtcgtttccgtgccatcttcggcaattgtcgtgccatactgagctgagtctctcgcgccagcaatgacactatccggaacggcgtagtgccgctgtcgggcgttctgtttgtctcgtcgattcttgcccgtcaaatcaccaacctccgggaggttggcccattcttcttcggataccgaggcgagggtgcgtttcagatcggcaaattggtgttgaattttcgggttattgcgttcgtattctagctgttcggctttctctcgagcttccctgtaggtagagagcgatttaagtcggtattttgtccaaacgaccagagctaatccgataaacaaatggtttcggaggtgaaaatgggagggggaaatgggagggatatgactaacctgcgagctcttcggcgcttgtccattttctcgtctacctcctggtagatacggtctgcttcgtcgtcttcttggtcgaactgcccgtacgcgaacagcccgacctcgttgtcgggatcctggaaccgctcatcttcttcctccttatcctcgtcttttccacctttctcgcgtgaagtggcgccgtaggcagtgggtgcagcagcccctagaagctgagctctcttggtgagagcagcttggatctgttcgggcgtaggtccctcacgcgccgggccaagatcagagcgagtggtgaatcctgtcgcaccacgacctagaccagcgacatagttctcaggcgctgcctggcttaggaaatcctttcgtccagaagccatatcgagcacaacacaactcaaagagctcgacgccgacggtgcagaaggcgaaggcgggctcggggaaatggtattcccggcgccggcaatcttatcgcaaaaaaagttcccgcccacattgaagtccatggtggtttgttgccgcaggttttctctcttcttgataattgtgaaattacagaggattccaagatgccaaaggttaataaacagaagcgcaataacgcggcttcgcagggcctgtcagatgctgccgccaagacaaaagctgcgcacagcatcttcaagatgaacactgatattggccagcacgttctgaagaaccctggtattgctggtagggacggattttcactgcactataccctactctagctaacaggtatctaactagctgcaattgtggaaaaggctgagctcaagcaaagcgatgtgggttacaaaagacattcattggcttaacaaacactaagagtgtgaatcaacagatcgtcctcgaaattggtcccggtactggtaacctgacagccaagattttggaaaaggcgaagaaatgcattgctgtggaattggatcctcgtatggctgcagaagtcaccaagcgcttccagtctactccataccaaaagcgcctagaggtcattcttggagatgtgatgaagacggagctcccatacttcgatgtctgcatcagcaacaccccctaccaggtatgtacagccccagattttttccaagggttcttcccgggtctaacagagtcaagatctcttctcctctcacattcaagctcctggctacatctccggcgccacgttcatgcattctcatgtaagtctccgctagcaaggctagaagctaccagagatgttttgtgaaattgagagcttactcgaaaccttccacacaggttccaacgtgaattcgcactccgtttattcgccaagcccggcgacaaactttacagtcgactttcagtcaatgcgcaaatgtgggccaagattgatcatatcatgaaggttggtaagaacaacttcaagccaccgccccaggtcgagtcaagtgtcattcgaatggtccccaagaacccacggccgcagatcaactacgaagagtgggatggtctgttgcggattgttttcgttcgaaagaacaagactctccggtccagtttcattagtacgacaagcatcatggaattgctagaggcaaactatcggacatggtgcgcgcagaacgacatcccagtggaggatggcccggttgaagtcgccaatgacgatcccatggcaatggacatggaggagcaagaggaacaggctgtcgaagaaccggccgacgaggtcatggatatggacgacgacgatgttcctgatttcttcaaggagagcacaaatgcccgcctcgaagcagcactcaagaatggagcttcgcgcaagaagcgtggcaaggttgcagagctagtccgtgagaaggtgcgccaggtcctggaggatgacactggcctcggagaaaggcgcgcgagaatgtgtgacgagaatgatttcttgaagctgctctgggcattcaaccaaaagggcattcatttcaactgagcgaatacagaccaagtctgtcccggggaaaaaaagcatccgaaaatagaagttgggaattcggatcatgaattatgattactatcaataggagataccattgtcaggaggttcatcaccagcaggccggaggtgagcacgcgagtcttgaaacaggctttgccagatgaatgcttcgctgagtaagagctcaatgtctttctcggtccaacccttcgttggcaatgcttggaggaacatcatcacctcctagaagacgttagttcctgtttactggtgacgatattcgattacaacatcgtacctggaaatccatcttgaccaattgatctgtccacttgaccaagaatgcagcgcagacatagaggtgaaatcgagagaagccctgctcctcagcctagaataacgatcagtatcatgccagacagtccctgggagaaaacgtaccatgtatgtgtcccacatgcgtatcgtatttttgatgctcatttcccgcatgagcaagcagttcatccatcggaaactaaattgcataaattccacaccttcttgttccaggtgctttgcgagtgctgcatcgatgcgcactgtcaagtctcgtaatgccctgacctgtcggtgaatgccaggctgggcgtatatgtagttgtcctggataccgtccagaagctttgtcaaacaccagaaggtgtccgcttccaccgcatctaacacactccgaggcaattggccagggtccatgccttcttcaacgttcaaatcggttatgtaaacgcccaggaagacctgccagaatggtgtgactagatcattgataccttgaacataaccacttgctgggtgtcggatggcccagagataaaggatgcgttccaacgaccgctgggtggcttcataaccatacagcggaatgtgggggctggtgcgtggaacatcaatgctaatctggtgccatactgcctcatcaagtcctctgccgcggcccttgcttgaagaggggtttgcagagcttgccccactacctcggtcaaaggcttgccggattccatcaaggtattccttgcgctttcgttccagagtggagatgcgtcgctcactatttgtaggaagatagccaaggaggagctgccaagtcattggccgcacttcttctgggacgcctgaccaagcgagatcccgcagctcagtaggcgataccgtgctcgcttgcaagatgcgcttgaacttgttgatgcgcgtaatgcgactcgaatgaatgtccctctctttgggtgaagcatctatcggaggtggggagtggttgatgaggttcaaagcattagcaggatctataactgtcagcatggtcctaattttccagtcgcctcatacataccatgtaggatgtccttgtattgaggccgaaggatctttccctcccccttgcgagcagttggatacatcggggcaccacgctcttccgcaatatctgaactatccgcgcgatgtctgttggcggctgctaatccatacccaagtgtcgaggggttgccaccactgaaatcaatattctgggccttcaaaggcgcggatcttttcctcctcatactagcaagactagggagcccgaactcatcctcatcatcatcgtacacaatctcgtcgtcctcatcttcttcttcgtcttcttccgtggggtcgcgactccactcgtcgaccccgtcggccataatgccagggtagagttgtcggggaggtgaggtcaccatgttccctgacttgcgagccgagtttgatgcagcatttgtagccgatgtcttcggaggtgttctcggcgctgagtgggaggaggtaggtctgccaagaagacacttgtcagtcatcgtttctgataaattgtctggatatgtagaatgtatttctagcatactgtacaatattggcatgtgagtaggatgcgcccacaacagtattcgagccatagagcttcgacgatccctgatttaggggcgtacttcggccagcccagaatggcgatgcggcgcgtcttcaaacaacgttagcatccaacatacaccacagctgttccatagctgtaggagagggtgtatagagctttcacttactccgagttgtctgcaaaaaggggagaaaggcgacgtaagctatagctgcgattgaaatgcaaggggaggcaaaagacacgaaccaacctggaccatttcctagggatacagtcagttcaatatcctgcgacacaaggatcgaagaaagccttcgaattgcgacaaaattcatacctgttgcccttttttactagccatcgtatgaggattcagaggtgtgctcatgcgggagtctaatacacgtgcggggtggcactgtgataggatgaatgccgtatatcatgcaaccaggccatgtaggaacggaataggagatcaatagaccatatttgggagtaatacctaggcaaactcgagttgaaaagcaaatcaaactaatattgtaggttctaaccacatctagataccaagtgcctagctttcgccccgactccggcgtgaagaacgcattatgtaagcaatgcgcttgaactcccgcggtgctggacttcctaacttcttcttccgcctgctctcagcttttcgctgtccagttactttgaattttgctctctgatttactaaggctacacgcgtttccgcgactatctctgcttttgctttattcaacgctcactatttaatcatggctgaccctgaggatggagatgatctcttcgctgatctgtatgttttctacttcactttaccttgaataatgaaattctaatcaggcttctttcatagctacgacgctgatgattccaccaatcgtaccactgcagtcgaggcgcccaagcctactgatctaggcgcgaccaacttggctaccactggagactctgctcaggatttcagacctgaccctgttggcacatacgaatcgcaccctagtcagccttcggaatttgacccgggttaccacaatggttctggaaatgcttatggtgcccctgccactagccaggcaccccctcctgccgagaccgagtctcacggaacaggaattaaagaagacgggtaagtccactaattgcgtttcttttgcattttcatgttcgaactctaccccaactgcatgtatccgtctggttttgggctttacctcgtcagtacaggcctgggtcgcgcaattgctattcatgggttaagtctgggtgccggaaggagtctcctatctgcgggttaaaatctctctgggatgtgggctgttggctgtttgaggaaaagtccaccggttggttgacggcgcacgcgttttcaaccttggaaatgagggagaacaaactgcgggctcggcgaccatcaagacgtctgttcgagggacccattcgcacaaccaccaacgtctaccaagggtgatctacagatcatattgggagtgctccagcatttgctacacggaatcaagcagaggctcgaaagaaatatcgcctgggacccttgatcaagacaatttcttgcgtgaatcaaccacaccccaaccatggacctttgtcacaaacgattcatatatagtacagccgatactatatagtttcctgtcgatataccttgatagggcagagcaagaagtagctatctagcttgagactctgtgttagacaaggcaaaggttttcacgagtcagacagacagacagtgacaattcactttttacgactgaaatacttgcacctcctcgcttctcatctcgcctgtctccggcttgagaaatccagaaagagaaggacatgaattctgcatccaggcccatgtaaaccagtgggcttgacgttaaatccctgtcatgaacatcaaaattgctcaagaccatacaagtatacattgacagtgactacgaggcacaaagatcacgtaccggccaagcacgtgcgctgcttgttccagggccgttgtgcccagaatagcgaggcttttcgtgcactcgaatagcccatgaatagcactacctccccttaccttttcacgttcatttacttcctttaccctaccacattacatcctgtcgttcgccgatcataattggtccggacatttgctctttcattttcatgaacagtcgctaaccgaggacaacacgtggttagaaagatgttcatcggtggtctgaactgggaaactacagacggtaaatctatctttcttacacggtaaatgtatcatatagctgacatatcttgaacgtcatttagaatccctccgtgactacttctctcagttcggtgaggtgcaagagtgcactgtcatgcgagatagcgccactggacgctctcgtggctttggatttttgactttccgcgacgctaagactgtcaataccgtgatggtgaaggagcattatctggatggaaagattgtaagcatcacctcgcaattgggacaaacaaagtgaactgttactgaccacatcaaagatcgatcctaagcgtgctattcctcgtgacgaacaggagaagacttccaagattttcgttggtggtgttagccaggaggctaccgagcaggactttaagcaattcttcatgcagtttggccgtgttgtggatgccactcttatgatggacaaggacaccggacggccccgtggattcggtttcgtcaccttcgacggcgatgctgccgttgagaaggctctctcccgtcctcttgagattctgggcaagccaattgaggtcaagaaggcccagccccgtggcaacctgcgtgacaacaacgatcaacgcggaggccaccgcaacggaggataccgcgaccaaaaccagaacgatggaggtcagcagcaagcccctcagcagggacagggtagttcgatgactcctcaaatgatggcccaatactggcaacgcatgcagcagtactttaccatgatgcagcatcagatggccggtcagggaggaatgcctggtatgaacatgggcgctatgaacatgaaccccgctatgatggcccagatgcaacaagtgcagcagatgcagatgcgtcagcagcagcaacagcaaatgggtgcccagcaaggtgctatgagccccggccctcagagtcctggctcccagcaggctatgcccaacatgatgaacccggccatgatgcagcccaaccaagccgttgctgccggcggtcctgccagcgattccgccagccctgtccccaatgccgttgccatggccgctaactacaacaacggaactccaaactcagccagaggacagactggacctggatacaacgcgaccgagcagatcgccttcgagcagcagaagtatgaacagcagcagatcagccgctcgatggatcctcgcggcttctcgccttaccagcagcagggtggcccaacctcgtgggagggtatgtacgatgaagttcctcaacctcacgttccgactggaccagcaggtatgagacgcatgggaagttcgggtagtggtatgtgattcttacgagtctttgcatattgtgtccctttcatctcaattcctttccattcctactttatttgcgcacatcaactaacccgtctctcaaacaggaaccactcctcagccccagagcactgctcccgccaatgctcccactggaccccgcaacgccggcaagcctggtgcgaactaccgtggcggcggccgaggtggacaccgtaccttccacccttaccagcgctaaagtgtcgttgttgctccttcaaatgatgcatctagtcgcttctcgtttcagatacgatttcgtttcttttatgtgttttctaagtctttttttacctgaggccagcgattttgggcctcatggattgttaattgcgtggccgccagccgccaaggtgacgtggaaaccctgcgagctggttgtattgacaatttccataccctttgacttcactctaaggttatctggtccggtgctttcgtgcttttgttcgggggcgctgacgtttgagaatcaacctgggtcgaggttatccgtgataagcgggaagggaattgttcggtgatcggtgaaagcgagtcttcaactcttgttcgggctcggtgatacactactttgtcttgtggagttagcctcacaatcaaaagccgaaagtgttcattcaagttccgttgtaaatggtcccgtaggtggaggtcaaagggcggaggcgaagagcgattgatggattaaataaaaatggtcgataagactccccagccatgcatgataggtgacttatttatgcgtggccagcgcgacagtcgccaaccaaaccagagctattttgaatattcaagctactgtctcgaaccaatcggtactcggggatgaatttccatatgcttttgagcacagaatactcctttttatagcgtggtgatcacattgatttcatgggttgtctttcagatagggccacgcaatccacgtgactcagatgattgccagttggcatcgttcaaccagttcacggatctcttaggaggtttgctaggcattgtcatatacctgaacaccgaatttccaacatctgaagggaaatgtactatcagggagtacaaagggacttcttcacgagcctgttcagatatatgactcccctcactcttatcgcttccaccatgcattcccatgtttctgtctatatctttgtgtcatctaaggaatccaagttatatatagtgcttaagtacatgagattatgtttgaatactttataccgagaaggatagcatactcgaactcaacctcggactgtggttgggactgttttccaacaatatatatagtagtcaatcataagagatccattggccgcaatgtactcgtctcatcaggattacaagactatgaccacaaaatgattcttcggaaatccaacatggagaaatgctcatcaattgcaagcggtaatataaaatgatagatggtaaacatggtaatgaatgaggtatgtatgaagacaagataaaagaaagaatgaaagtgatatcacacaagaagatgcatctaaaggcgggaagaccagtaaattcccagccgccattttcaagcacgctaaaatccgtcaaaaaaaagtaactcccaagccacagcgcgcgtgcccgatccaagaatatcgagaagaaaggtgagaaacatgggagagagagagggagagagagagagagagagagagagagaaaagaattgtaacgtcatatcaagcctgtgacgcccttcgttggttgttttttattggtttttatttcatttttttaatatgccatcccgtagcccggggctgcaggacgacggccttcgagagagcttcgcgagtggcggctgtcggggcttgagctgcgcgcgtgcgccacgccgtagtcgttattgactaggcggtcgcgttcggtgttaccaggtgatccggcccgcttgggctcgtctctgtaggtctggtaggggccggtgaagttgaagttgctcatctcggcgtattgcttgcgctgtgggtgttccatgaggagcgagtcccgggcgtctaggggagtgaggtcgtcaatgtcgcggtttgctttttctataagaaagggacggttagtaaatggacatgatgggatgggacgtcgctttgacttaccagcttctcttctccgcttagcatgtgggttctcacggtagcagctgatgaaggcgttgactgcaatgaggatagcgaggacagcagtgagagtagactgtacgacaatgaggacaatgccggtgacggtctttgttgtttgagacatgccgagctcttcaacgaagaccagaacgcaagcaatggacagaacacggatgacctgaacggcgatgttgatgcccagtgatgccttggtggcatatgggcggctccacaccaagagtcccaacagaaggacttcgcaggcaagctggccggcgctttggaacagaccgtggccctcgccacctgcgatgatgcagcccttgaccaatgcgtacataatgacggggatgaagatccaccagaagtccttcttgtagttatcgtagaacagactgtattttttccaggtttctttatcttcgtacaggcgggaggtatctccctcggccttcttgtacttgcgagccatgtaaacaatgcgaatagcaaagaagagaagaagcgccgtgaatagagagagggttatagctgctagcagctttgctgcccacgagtcaccctttcgaagttggtagacacagtatagcacccagatactgtatagcacgaggatcatgttggtgattgtccgtgccatcatgccccaataatccttccggaagtcagacagcttgttagggaagtttccatacagcgcccacagttccaggatgaccttcattaaaagaataccgacgacaaccaccgcgataacgatggcgaagatcacgaggatagtcatgaaaacatcggcagaagggaccatcagttcttcagcgacttgcttcaggtcggtgattttgctggtagatgtactttcagtgcttgagctgttcgaaacactagcatcagtagaagtgtcaaccgagcgagcaaccatctcgccgaattggatggtgtactcccagctccgtttcgttgtgttggtggaggatgagctactttgcgtcgtggaggaattcaacaagaactcatagctttcatcggtcaagttaccacctgtggccgcccgaaattggtcgatggacttcatcagaccaggccaagggatcataccagtactccacatgaagttggaggagaagctgcgatagacggaggggtaggcgacactaagcatgccgttggtggccatggaatggaaccagcccattacatcgccaaatccagggctggaggacggtgatccaacagttcccgccgagccgatggcagagacaccgctcagtgccagagcgcctgccgcaatgcctgccgagacgtatttgaccgcagcgacgttggtggtgtggccgttagtcagttccgactgaatgcacgccaggttgctctggctttgcttggatttcaggacaagcttggcctgaccatccaagtcgggcatggtgaatgcgataccagggatttgactggcatatgcggacgggacgtccatggacccagtggccttgaaagaacccttggggacggggcagagttccgcgacatgaatgtcatcgccgcagggatcaaattctttactgtagagttggctgccataggcagtgacggtgatagtcgccgacacattctgttccatcgcgttggtaccagccaagtcgaagacaactactccagtagaacgagtgtaggtaacatccatcttttggacgttgattgccgaatcggtcatgcataggtcgaatccgtccgtagataggacgtcgcttgccagggcttgaggcaccatggccaggcctagcagagcccagatgaagttctgcatgttggccaagcacaattgatgtttgataggtgataccaatctaaatctaacggtttgagccaaggaggcgcgtagtcatcaaggatggaggggatcgactggcgcgatgatcggacgggttgtaaggatatgtggagcgactgtaggtaagtcacaggggggaaaattccaaaggaaaggcaggatcaacccgcgaaagaaatacaaagataataataataataaatgagtcgagagggtcgcaaggacgaggcggctgtgagacactggttttcgagcaaccaggagctgcaaacaagtgaacgagagacggtgaaggagggtggtaggggaagcgactggagattagtgaatggaattccccctctctcaatgcgatgatctgtgaaagaagaaaagagagggaagtctcgtagattacgactttgcgattagtctcaacttggcccctgaattttgagactgattggcctcccgtttcagtctagacctaacactcggcatattactattttccattcggcttggtatttatatcttaatgccattacccatgttattatcccgtctctattattcccaacgatcatcttaatcctgcacaaatctgatctggaaaggcgttgaagtacaccaacacagtggaagctcatatttaaagctttcgtccagaccgtccgacccaaggtttgccactcatgtaaccatggttccagcctaggaggtaacccgaaggagtggcgctaaagttctcccggtcgcccacacccatggaacgcattcctccacaccaatcgaggcacaacaacgccacaccagccacacgggatgccaagttgcccctagcgcgtgcgaattatgatgaattatgattcgaccattcaaattaacaatgttttattacggagtatggagtatgctggtgcaaggcggagatagcggtatgtacctgcagaaccgaaacataacgaccgagtatagactccgtatctatggtccgcttcttcaagaatcggacatccctattagtgcatcttgtgtatgagatgtgccccgcgaggggcaggtttgcagcctgatggaagaaagctgtagggcttaaaactggaccgccgatcgaagatccttgcacaatcccagtcctagacagtggacccttacagggttctggatggacacatacacactgttcttggagaaaatcttgccatactgcatgccaccaatcgagtccgagcactagaaatcctacacatctccgtatgaacgtataacatagaatttgagacttatgtgggttcaccctatggcccgatcatcaatgtgagacaaggctaagcgctggggttccactctcaatcacagagatctattcttgtcgcttttgacagcacagcgtatggcaccccaattattgcgactatcactacggagtacagcagcctcggacctccttccacggtatttattcgttgtccgtatataattccgtactccgtacccatcctgttgctagaaagcagtggagtaatccgtaaaagcttagcagatatttatatctaccccgtaaatgattcagtattatttcacggtttcagattgattgttaccagtaaacaaaccctgggatgatatgaaatggagcaactatgttgtacaaaataggggcctgatcccgtctccaagaagacccactacaacctaaagaatccattaatgaaagcaacataaagaacctcctactcgagagttaaataccaagtgcggagtagtaagtatagttagaaaaaacccgagataaatcatagacgcttctcttaatcccgtcggtaattcaatattgtaagaatacataaatgtagtctataagtccctatcctttacggcacggcataagactttatgattcaagcgtgcaagctcgagataatcattatgttcaagatagtacggatactacaatagatcttttttcaatgtcttgtttcctacataatgttatcgccgaaatagtacataatagttgcaaattgaaccacagactattcgtaatgttaagcataatttctactaggatatcccatgtatagcctgtgatttgtacaacgaaaacatgacttcttcaacgatggagatatactccgtaccttcctattagagccgagtatccggcagaaaatgtggtattcccaccgcctaccacattgtgaccgacaagcaaagacttccatttcaccgcccccctcatcacgtccttctctaggcacaagctcgctaccatggggcccgaggggctcgataagcccgagatcccagataaacctgagaaaagatctcgtcgacgtggggccgaactcgatccattccttcgcacccggctctgtgtgctcagaaccacagccaaatggacctacaaacagatccagaatgaatacccacacatcccactctcgaccatcaaatcgaccattctccgagagagcaatcgtgtcaataaccactcacaagcccgctctggccgaccgtcaaagctgaaggacgaagatcgagcccgaatccgcgaggcttttcatgcgaaccctcaaatcacatacgatgaactgcttgtggtagtggattataaagttggcaaggagtcgcttcgtcggtttctgaatgatgatgggctgaggaagacacagacccctgctcggtcttctttggctgggaaaggagctaccaaaaaagttgatggggctcaatcggttcagtcatatgacacaccttctgctgactgggctggtgatcttgcatctggtctagtacccagcgattcagatcctgcatctgctacagcgagtcaagtcgtcagcaattagacttgttgaaagagataccccgggattttcggcgttgcgcgttactttggaggttgtctgctcaattattcaaccagatttattctgcatgtcatgacaagcataagttatacatgataattatacaacatagagcattggaatgaaaccttcattgcaggattaatacacggcgaacaattggttccgatgaaacatccataatatagtgtgatcaattactgtatcatcaatcccataacctatagaaatgcttgattccggcatcctttgtctggccattgtttccgggcagcttgcttgtatcatgctaatggtctcagataaagtgtggaaattgcaggcaacatgctaacagaatagacccatttctaatcctagacggaaaatgggtaaatcatagccatttggggtaaatgctctacttagatggagttatttttgcagctcctgtggactcaataatgaaatatgacctgaataactagttattttacttcatgcagtcacgttgaaagatggaatttcataccccagtcacgtttggtacttcactatattcgctcttagatatgccaggcggagagaaagaaagcaggggctcactattccataaataggcatctaatagaactcacaggacaagtgatcaatatacatttggctttcatacagcatttggttttgagctttttcaatctagtcggtacattctcaaacactgtgtccatgtcttgtaggtttgattcccttgcggcatttcttgtttatagagcctacgttccaaaatatcctaaagtatacagccgttctataaacaaaggggaaatttgaactttggcggaagagtaggctgacctagaagatgtgatttagttaccaagctctgctgttaatgttagaagtaaaagattcaattactagactctggataattacattcgctcatatgtcacatgttggaatgcaacgcaaatatcaaccagatcaagtcgcgtcattgaaaataataataatagaaagagcccaggctgaacaaagcagcagggaaacacaaattgtccatatgagaatatcatcatgagaacaacaccggacgccggggtattttcctttttcccgaaaagcagccgcctatgcagaaacaaagaaaaatcgctaaataaatgacaaagataagctcatgtcatcgtcacatcttcggccggggtggcggcagtggaaggcacagcggatgcatcagtcatggcatcatctccatctgcatcatgcgcaggggagctctttttcgagtgtgactcaggggtaggagtggcagaatcgctgaacgcatcatcgtcagatccagggtcattttcatctacctcttcccacagacgaacagtcttgtctattccgcagctcacaaccatacgcttgcccttcagtgtacccgtgtgaacacaaagcacagagcccgagtgaccatcgaggcgctgcagaatttccttgctcacaatatcccagaagaggatagagccatcctcgctaccgctgacggcgaagcacaggggctggttgtagagcacgttttcagccccataagtaccgaagcatcccgacaagctgtatttgttgttgacatggccttggaaagtcttgaggacgcggctctggacataattccacatccgaatgcagccgtccagggtccaggccaagacatatttgccgttaggggagaacttgacgcatgtcgcaggcgggttgtcttccatgactagggtgcggagacactgaccgctgtgggtgtcccagatacgaataagtccatccagagcgcatgaggcgattaggcttccatcatgcacaacatcaataccggaaacagggtcagagtgggctggaagagagcgcatgacttgtgctcggcgaacgtcccacataaacacggcctcgtcataggaaccgctgacgaggatgttacccttcggtgcgaatgccatttgatagacgtagttttgatggccatcaaagaccttggtatgggctttgagctgtatcaaagtatcagtaaaaggccctaggacagaaaatgacaaatgagtttcttacagtgttcacgttccagaaacgaattgttttgtcatcggaaccagttgcgatccagacgccgtcaggggcccaggcaagggtggagataccagctagatgtccctcaaagacatgaatgagtctgccactcgcagtatcccagaccctaacagctgcatcggcacctattgtgcaaagtcagttatcaagttatgtagtagctagaccatggacataatatatacccgcactagcaatcatagagcaatcaggtgagaattgcacagccgaaactccacgtaggtgaccgcgcatcacaaacttctccttgtagttcagatgctcaggcttgggaggcaccggagcaacaggcgtcgcagaacgatcggaccagtcatcggcatcaccagcctgattctcgtctgaaccagccacatcatcttccgcgagatcatccgaaccgccctgtgaattgtcgtcacggatgggagaggggctccggtggtggttgcgcatgcgcgaggaacgccagtattcgtctgcgtccacagctaactcgtcagggctctcagactcgctgtagaggcggctagttttcttcgggcgctgtggggtgaacgccttttgcagggtccagctggctcgtcggcgttcagcttcgtcatgctccgagccggcggcgagttcatcggaggaggactcagcgggagattgggcgcgagggtctcggcgccgaggctgggggtttggatgatccattgtacaatagggatatgcaaaagcatctaaacaaacgatgcaaatgcgccgatatgggtttaaagatagcaaccccgaaaataaaatcaatcggacgcgtcgcgaaacatttatcaaggcggtgtatatttttgcgggcggtgagagtgaggcagcttttggtgactgcgtcatattaaaccacgtggacccgtggccgttcacatggattaacacttgtttagcactttattgaccacttcctggtcgactaatacgcctaaatatagctttcaaagctcattctggtcaatatctggcccaatggcctactctattccctccaaagctccaaccgacattcgtgtcctcacattcaactgctggggtctcaaatacatcgccaagtaccgccatgaacgcatgtcggagattgggcggcaattggcaatagccagcccgccgcccgagatagttggactgcaagaatgttggacccagaaggattatgaaagcattcgcgatcagactcgacacatcctaccgtatgggaagttctattacgggggcatatttggtgcgggattggcgattctatcaaaatggccaatcgaggaaagcagcatgttcggctacccgttgaatggccgaccaacggcattcttccgaggagattggttcgtggggaaaggagtcgccagcgcacgcgttcggttcggtcccggtactgctgacgtcgccgaggtgttctgcactcatctgcacgcgccgtatgagcgcgaaccaaacgactcctatctctgccaccggactgcgcaggcatgggagatctctaagctaatgcgtggcgctgcggaacgcggtcaccttgtcatcggcctgggtgacttcaacatggtgccttcctctttcgcgcaccgccttatcaccacgcagagccctgtccgcgacgcctggcgtgagctgcacccggactcatccctcgcggcagcaattgatcctgccgaacaagcacggaatcggcctattcccactgccgagttcaatcttaccgagaatggagctacatgtgacggggccttcaatacttggcgttggactgaggccatgcgcaagcgcctagtcaagggtgaggatattgagattgacaatgagaccccagacccgcgcgccaaacgtctggattatatcttcatcggcgacggtggctacccgcctgcattcccgccatctagctggtcagtccagtcagttcagatctccatgacacagcgccatcccactctcctctgctcgctgagtgaccacttcgccgttgaggctgtcatcacccgttcttctgtacggacataccctccttcccactcttcagactctgccccaagctctcccacttctccttccctgcatgaaacaacttcaaagcccgtctcccccaacgccgccctttctccagacacatatgaccacatcattgacatgacccacacatacgtggcccgtgaacgctctcagcgccgttggcgtctggcgcatttcttggtatctattgtgatttccattggttgcatggtcggcgtgtggtggattggcaaccgcacgtacatcggattcatcctcatcctagtcagcacgctcaacttcgccgctggggttttggatggtttgattggtgggctgtttatgtcgggtgaattacgggccttgaaagagtttgagtgggaggtaagaaatgctagaaacctggtcgttgccgccgagaatagggtaggtgctacttctgaagaaagggacggagatcagaaggattaaaaattttcaccgcaagctggtttgtggaaaggggaattatacgtggaaggtgtggcttgattgcgcggcttaactgtctgtttatatttacttaagtgtagtatagtatatgcccagctagtcttatcctcgactggcaaaactaattcataattcccaagatcaacttcaagatagactacttgtctacagattaagcataagagaattcggcatgaaatgagcgtgtgcatttgttaaaaattcgtcatcatcaaagcgaccgagtccaccagcatcaagcaaggagcaagcagaaacgacaaagagagccagcacgagagagtgcgaatttactcagcacactcgcgcttgcgggtgtcaaagacacgcagagtctcctcagcagccttaacaccactcataaccatagcgccgaaagtagggcccatacggttgaagccgtcgatctccgacagctccataccaccaatgataaggcccttagcgacctcacgggtgttcttaacaatagcgtcctcggccgcattcatgtcaaggccacgcatgccgccgagcttctcaatagcgttcatggagacaagacgcttagcgcagaaagcgccgaatgggccgtcgtggccagtggtgctgacgataaccggggcattgatggtgttggggtccatgcaggagtggtcgtcgtggtggagggtgacgagagtccagttgacgacgacaccggcgaggcggatgtcgttgccgtcgggacgggggatcaggtcctcaacgcaggtcgcgttgaagagcttgacgttcgggaaggcgaggacctttgacaggagcgtcgacgtgaacagcgaggcgtgcttgacgacgacgaagttcgggttcgagggctcttcctcgaagggcacgccgagctcggtcaggaaggcatctgcggggcgacggaggatcatggcgctgaatagctgaccacctagccaggcaccgccacctatatgatatgtgtgttagtggtgctgtggtaggtctacgagagagggacgggtgatcaggtcctcaacgcaggtcgcgttgaagagcttgacgttcgggaaggcgaggacctttgacaggagcgtcgacgtgaacagcgaggcgtgcttgacgacgacgaagttcgggttcgagggctcttcctcgaagggcacgccgagctcggtcaggaaggcatctgcggggcgacggaggatcatggcgctgaatagctgaccacctagccaggcaccgccacctatatgatatgtgtgttagtggtgctgtggtaggtctacgagagagtctgctcgtgtggagccgagactaaccgggcgaaacagaggcctcaatgatggcgatcttcaggtctggacgggccttggcgagtacataggcagtactcagaccacaggaaccagcgccgacgatgacaacatcgctctcggcgtagttgtccagatcctggaagtagcgtcgggtcatggcgcgagagacttggctctcgcggataggggcgaacttgaactcatcccatttgttgccgaactgctcaaggaggtttgactggccatggccggtcagtgtcaccgattcggggacgatgaccttgcccttgatgccggtaggggcaacagtagcaggctcaaacatggcagcgggaggagacataatggttcagagatcaagtcggggatttgactttggaccttggttagtttgactactctatattgggggaggggagggggggggagggcatgatcctttcgctggtattatccagatcaagttaaaggccgtataatctcagaacgaacccacgccgacggtgaacctgatgtctaataagagacatcggattcaccaccgacgcaagaacggacaccggctcatacccagaggttacctgagataccttgatccctgagggataatgtgcccagccaaagaaaatccatggctcccgaaggaagggcagtatgtacttgttcgtttgggatctaaacaagagtcagccttgagggtatgcaagcatgacatggcagtagatagttactgttggaatataaattcgtcacttgattgatgaagagaagaagaagaagggaaaaaaaaaacaactgcgggcaggtcaaccttatatgccaccttggaagagtcataccccaccatccccatcgccatcccacctatcgagatgtcatattgctccgactccctccggttgtccgacgagcttcccggtgagctacgttgcacgaataagatgctctcgagtgacgtttctagcttttctagctcttggctacgaatggccggagcgttctgtcccggacttccttgttttgctccacgagagtaccggtacaacataggtttcctgtgagtacatatggtatgtagaactgcacggtagattcttgaaatagaatgtgggaatataatacgttaatcaacaactcttacactgtaagattgtagctgtcaagcttgtatggagggcgtaggacatcgatgtacgttttactgacggtgactacaatcggaccaaccttgaaaagcaccaaggtcgcagaatagatcaattattatcggaatgaatctacacgaacttgcttggtataaatatgcgaattcaataggaatatatttcattttttcttcgaagaccctatgtgggttttctgacatcataagtcatcacagcgtttagctgggtcatatatatgtgtctatacttaccggatttatttgagctgccgccgcttttatgtagccaaacttcgactacagctggattgatggcggggctacgcgtatttggtacctggtatgggttgctagtgagtctcttgggttgagtatgatgtctttattactccaaaccttatccatataatttcggacaccggaatgtctgcaccttctatcctcgtgaattccccttcggaaaaccctacgttggccttaaaaatgtctgatgactcggactccccagaagtcgagcactcagacgtcgagtgcttcgaggcgctgcccgacgacacagtcgaagccaccgggtcgacggagagtgccatccggaagattattagagaaaaccaagaaacaaccgacgtggtgaaatatatatgtttcacaaacgtcctaccaactattgcggacaatttttctttgcgcagtactcggcagatgtttaatcgccgcactcgatatatgatcatcaagctctttattggggcccatgaaacagcttcatgcggcctgggtggtgcagtgcaatatgagatatacaatatggggctgggcaagtcgattcgcccgttagggtccaaaaccatccaaggtatgttttgcagaaaggaggccgaccgttatggtcgaagtgggagtatcggagtcatatcgaaagctgcgagcagatgcagaatggtggctcataaactcgaggggcgatgtgaagcttgtaattatcgtgtccattagtcgaaagacccccaacatcaagtttgaggctgttactttggacccgactgtcaactccttgcgactgcagtggcccaagatacggcggaccattacggcatcccgcgacgcaaacaaaccctactcacagattaccatcaggccagcagtacctttgatcatcgggtttgaagaattgctttgtcgtcaaccagtcccgcctgaacacgacattgaactatcacctgatcggttgggagggatctcaacacacgtgtggggggagcaaggattctagcttattattacctctatacctctgttagttctcgtagctagcgtcttcaatgacacaatctttgctacaataatcgtggagtgattgtcaaagcgctgtgtagattcttgaagacaggggacgcgacagagaaagatggctgtagaaagaagaagaatgaaggtcatgaaggtttatttagtacatgttatatatttgccatactatttgtttgccatactgtatctcttgtactttatcagtttctcaagcagtttctcaagcagcttctcaagtggttgcttaagcggttgcttaagtagttgataaagtaattgacgataaagtagttaattaagcagttaataatgatatgacaaaagggacttaattttattagtggtttacatacaaattgtaggtacctactgccatactactacatatggcaggaaatatgcctaattgtgcacgcggtactgaaattacaggcagggggggaataacccagtcagaggggcgctttgcgtagcattaaaagttggaatcagtcgcttcgctctgcaacgactatctggaggtcttaggccgtcgagatcactagtatgttgagccgagctctggtttaatcgatgagccgacctgtactctggaaatcagagtgctagatgatgatcaggtgatgcagaatactcagggacgtgctccgttttacccagtgatcaaaaagcggcaagaggtgagcactaaaatggaaagggaaaggtttcgagtgccaggcattatccggtacatatgcaagatgcaagagaatacatgttatccgtaagagaatgcaaaatcacagcacaaaacggtaattggcaccgtaattgtcctccgctaccgggccatccgcaggttttgttgggtcttcttcaatttgaggcccatacttcttgtcaaggcgccggttctcccataccagaagcacacgcagagacaaagcaaggagtgaagtgaagaacatgaaaccagcacagatccccataccctttacatacctcggggcttgtgcatctgggaagatgttggtgcccaggaaaggcccacactggccgatcacgttcaacaggataatacttccaccacggcgagtatcggagccctgattgtctgcacaacgtaacacgtccagtcagtaaaaaagctttgcacagaaaactctaaggatcagaaaagggaatgactcactcagaacccacggcagaatattggcgatcgaggggaagactccacaggccgccaagaacacaccgaagtatcgaacacccactgaggtgcaggtagcgcacaggatataccccacgccaccaaccactgataaagctgcgatcgtcaatccacgctgctgaatgcgatccgccacccaagtggtcgcgatcgtcgccaggaatgaggcaaagaatggaggtgcagtgaggccctgggcgttgatggccgtgaagcccatctccttgagaatggtgggtaggaacacggggagagaagagaaactgacgttacagctgaagtacatcaactaggtacacgtttaatatcagcaagttgtgcgcacaatatacacaatgagtacttactgctgtaagccacgctttgacgtcgagaagcgtcatggctaattccttccattggatcttgactgcacggtccggctcaccagattgttgcattgcccgggcacgcgcaacctccttctcttccttattcaggaacttggcgtcctgcgggctatctggcacgtagaaccaagccagcagggcagctgcgcagaccggaacaccctcaaccaggaacagcaatcgccaattcgccaacgcggaatgtcccgaagtaataccatatgccaaggcaccggcgaatgtatttgccagtggtgcggcagacagaaacataccgcatcggagacccagctcgtggcggcggtagaagaatgatagcagatagggcacaccgggaccgaagccagcctcgaagacgcccattaggaaccggagtgccatcatgcctttccaattactgaccgctgcttggcatgttgccatcaaaccccttttccgttgtccgtcagtccatgttcctatacattcgcaaccccggttgaatgacagcattgcacgtgggtttcataccaggagaacaacacaaaggcagcccactggtgcggcttgacaatcttccacatcattgcttggaattcaaacactgtatatgagatatagaagattgtcaagagccaggcgtagctttttccatcgaggtcgaggtcctctttcatgccggcgattttggcattgctatggtttccatcgtcagcggtcgtgctattttgcatgcaggtccaaggatgatatcgcgaacgaacccgatgttgcttcggtcgaggaaagcgaggagatctggataccacagaaacgggttagagtacaaattcgtttaatgtctggagtttgcagcatacagaaaaatcccaataacgtcacaacatgccagtccaatttccttaccactctccgctctaactcagggtcaatagccggcaagagtgtagtgggtttctcctggtgagtgggcacggcagatttctcaatatcttcatccggggcagtttggattacattctccaactgctcctgcctttccaagaagcccatggtgaattggagacgtcccaacagacaacgggatattaacaaggtgaaaaaggaagagaaaagagaaaaaggtcggacacttttccggagttggggttcggagtcatacttattcgcacggtgagagggaaaaaagcctggatccgcagaggcatactggcgtactacataatacagcgactaatggccagcttctagactggtgattggtgggaactgcagaaacaatttatgcatctattggtcatttggacaggcgaatgagatttcgaggtggagaattggaaactggagaaaatgcggaggaattggcaaagcttaggagagccgctttggtctgataggccgaggtcggggagcagtcggtgtactccgacagtctatatgttgtgctagttatctctttcaagatgaaagtaccttgatattgactgaggttatctatgtggctatttaatagaacagaattctcatgctgtaggtagaaaaaaatgctagtttgtccaagtgtgcggagtatagatctacaccatacttgccaacatcccttgaaatctcttatataaccatttattcatcatgtttgtctatttataaactacatgaataatgaatagtgagtctttcaaattggaaaaacgtaactagttaactataaaaactgatgcctgtaaatccaggtgttctgcatatcaggtcagtaccggggaccgtatcaaaaatctcccgcgtactgtcgcgttcatgaaacaactccatccttcattgctcttgccttatctaccttcatcgcattacaattccgcacttgattcaaatctaatttacacgtgtcttcccaaagcggattgcaaattggcaatcaagcgcgcaatatggatgacccggccacacgcatcccggggcagctggtaagaccccaacagctcccgtgtcaattgccctatgctctgtaacccccccactaacattgtcgcaattatgatagctcccccacatgcacctggtttcgcgcaaccgataccctagcatgcacatgatgccatccgagaccgccgtcgagtatttgacgagtgcaccccggatctgccaatcccagccaatgcattggacattcctcgatggtcccccggatgggactgttatgcttacatggcagccacaaaaccatctaggcaataattttgctagtgatggctatgtctgggccgaccaggaacaggcctttacctttgaatctcgcggctatgtatgcgaggcttcccctgctccatgtggattccattctaatgcttaaggacacagaccgtcgagatgtaccttcaccgaagtggtttccaccctcccaatgagcccgtggcaacacattgccgcaagcgctaccgtatcacctcgtccaaagtaccaaacgctccccagcccgacccatccctgtggattgtgcactacacccgtgcggcgcctcaggaccatgcccccgcaaatcgcattcaagttacaccccaggtccagggcatgatgggccagcgccgtttcctccagagccaaggacaattggcccgcaaggactttttgcttcatgatcgcaacagttggccggttatcaacttcccgcagatggctccccagaactttgggcaacccggtgcttacccagccgctgtgcctcgtggacctggtttctatgccccccagggtcatccaggtgcagttccgccgaatgtgcccgtagccaaaggaccgcgcgggcaccgtgcgccgtcggctgccctcgcttctacaacagccgattttgctgttgaagatgaggacgtctccagtggtgacgctatggatcttttgacgccccgcgatgtcagcaagatgcgataccagcagcatcacgagtggatggaggaaatcttcgcgtcaccatacagtatctcacaaatcacaccggtttctttgggtctaggccgaaagggagagctcgagtctctgactgcgggcttcttcgatgctccggtcggaacctctggcggagacggccaggaggcgggcgacgccccgcaggctaacaagatggagccggctaaggcagaggagttcgcccagcgggtttctaaaaaggtagcgaacatgaccgccgagatcgaaaacttgaagaaacagcatgctcgccggatgcaacgtttcaaccgaacctcattgctcaaggatgccgagttgcgcctccgagagtctgctgctgacccaactgaaacgggcccagagatttggagactggagggccgagtggtcattccaacagaggacgaaacccctcaattggattacattgaagataaagccaagtacagggttgatgaggtaatccgggaagttgagacttcctggaataagcaaatcgtcgcggagcccaaggtatcctgtgtcgagaagggtggtttattggagaagattgaacccgaacacaaagacgagcctgactcatttacaaatgatatggtcatggacgatgattcttcccacctactcaaccaatttggcagcccgggcgttggtgtaggcgcagtctcaggcgtttctgtcaatggacaaccaatccacggcgctgatatgtccggtgatgttgacatggatttgggcgaccagctccacgctggtactaatggccaggctaacgactgggtaatggtgagcaatgacagcaaagaccatggcccagtcggtggagacttcgactttaccaacatcgacagtgccggagatgcgttggcagcttacagcgagcagaacgatgggcttgacttgccagacctggagaattcggcgttcggcgacgcgttccatgcatctgacaatgaacattcgcacaaccccgatgcggacgacatttcctagtctgctccgaaatttttcatatgaaagtgtgtttctttaacgaataattctgcggatcagtcattctagtctgtttcaggtgttgcggcttgctgttcgggagtctggatttatgcaggatgctttagctggttgtgtaccataggattggccgagggaattctctgcttcctctggcttctttttttttgttgcctcgaattgagaggatagagagtgggatctcctatgaatttaatccctatttttcatctatcttccaatgtaggtttcatcgaatgagatatttcccaactaggaaggtaacagttgtccacgggtgtccacgaatattcagaatctggaactaagggacgcctaccttctctatgattatatacttatgtacctatgaagtgcatgaaaccttggatatagtatcataattagctaatagtctaggactggtacagctagctgctagtgtgtactctgatatcgggaagccgagagtggaaaatggccctgaacctttcacgagacaggcttcaaaattgaaagaccatcaccactcacgcataatacaacgtcaaccttgaaatatccgcaatcggaaaggtgatggcatgtatgaactgctccatcgacttccgcccttgcccgttcatgacgtcagtcaccgggactgcacttcctctgagaaagaaaagagaagccttggaagcgaatagggttcgtcaccatcgtcatctataggaaggtgctaccgacttaacattaacctctcccatgttcagttttctcggtttctcatcttaacatatctccccccataaccctaacttgtattgattgactatatctacatacaagaaacaagatgtatgtattctacattctcaatcctcactgtgactaaaaggaagcctaggaaccgcaacctttcattccgatcacgcagggagccccctcgacagcggttcggaatttccaccttccgtggaatgcaagcgccggaattgagccgcaagatgaccaagctgatcaagagcgagaacactgccattggtgcccacgaatctgccggccgcgagcgcacctcgattgccgcccagctctctgaatggggagaggcgactgaagacgacaatgtctccgacatatccgacaagctcggcgtcatgctcgctgagatcggcgagcaggaagacagctttgcgcagaatctcgaggactaccgtagtatcctgaagcagattcgcaacatggaggcctcggtgcagccatcgcgcgagcagcgccagaaggtcactgacgagattgccaagcttaagtacaaggatccttcgagcccgcgtctggtcacgttggagcatgagcttgtccgggctgaggctcagaacttggttgctgaggcgcagctgtctaacatcgtatgttttgattctgacttcgttctgttcttgtggtgaagatagttttgaacttgctaacattcatctcctgcagactcgccaaaagctgaaggaggcttatgatatccatctgacggctgtgattgagcgcgccgagaagcagactattctagctcgccatgctcgtcgtctgctgaactacattgatgacactccggttgttcccggcgatgcccgccaggcgtatgaccacgagcctttggcacgccagatcctcgaggatgccgagaatgatctccgtggatgggaatccagcgttgagcctctcatcaccgtcacgggccgggaaactccggttcatgccaacggaaatgatgccaacggtaccagtgtcaatgaacgcgatgatgtgtcggatggccagtcggatgttctcgatcatgtctctgtggctgagggtttcaccgagccagtgggaagcggtgcgctgcccgcgaggatggtggtgattgagccttcgcctgcgtgatcgtttcaattcttctcagagattcagtggtctcctttttagttcaatgcggacatacttcagctgttatgtgtaaattcggttcttcgcctcagattgggcaccaagacttgctggtgtttttgggaaaggcgttggctggcactgcacatgggggtctatactcaggaaatatgcaaattgtgtattgtaaagtttaattctctaattctctaattcattacttcgtttgttttgttctttattctctttctcccaatatctttcaaagatgatatgaaatgaacatggcgatttgtagtagagcatgcacgtgaccacaggcgccagagtgacgcggaaaccccgagctccagcggagcttcaaccatcaccgactatctcaccagaatccctttcacgtccttctagcatctttttttctaattttctccttatttcctcttccttcagaacacaatggataagcttgttgcccaatactcgcgccctccccatcagaatgagttgtactcagagcaagagcagcaggacctcactgcgagcgtccctccactctcgctgaagttcagcctccctcctgtcgacaacgtgagttcctgatgaatactatgggagattctcttgcgactggatgatggcggtttggtcggggatgtacatctatcctgacgtcaacctaagctgcgccgtcatcacagctatgtctaagagaatcgctagccagaaactatacatgattgaaaaaagcgaaataatggactgacgttcatttcttatatctagcactctgctttcctgcgtgcgatgaccgatgaccactccaatcccagctgtcctatcaagctcgcccacggcacaacaaccttggccttccggttccagggcggtatcgtacgttttcctatatttcggttacaccatgggtttcttaattttggagcattttgctgattgaaatattgggttagatcgtctgtaccgattcacgagcgacagccggcaactggattgccagtcagacagtcaaaaaggtcattcctgtatcgcggttgagtcggggtgaggacaagaagacgaacgagccgacgccaggtcttctgggaacgatggccggtggtgcagccgtaagttggccgcaagctaatgggtgatggcgtgatggatgttggttgctgatggttgtcgcaaattgctaggattgccaatattggttgcgttatttgagtcagcagtgcactctgcatggtaagtcagctcgattcttgatattttcaggcatggaaggacatggctgatgaatttctatctagaaatccgacacaagcgccgtatcactgttgcggccgcatccaagatccttgccaacctcacttacgcctacaagggatacggacttagcatgggaactatgttagcaggagtatgtcctatacaccattcatagccatgagattcggaactgacaatgatctctagatgacaccccaagaagggcccgccctttactacatcgactctgacggcacccgcctcgccggtaaccttttctgtgttggatctggtcagactttcgcttatggtgtgctggacgccgagtacaagtacgagctgactgtggaggacgcattgaacctcggccgccgggccattctggctgccatgcaccgtgatgcctactccggtggtttcattaacctgtaccacgtcaaggaagagggatgggtgcaccatggattcgacgacatgaaccctatcttctgggagacaaagctccagaagggcgagttctccaacgtgacatctacgttgtaaatgggtctagaggaatgaatgtttctgtttaatattgatatcgatatgccattgaattatgcttaggtttcaaccaacttgtgtgctaggttcaatcagatggaaggcaatagctccatctccctatagtagtcacctgtctttacaaggttctcctggcctgcttcacagaatatcggttcccaactaaacagctagttgcatagccacctcaatatgtggaaacctccctctaatcaatctaaacttatccaacagaatatccttcggcataacctgcaaattatgaaaagaaagcacaaccccctgcataaaaacaatatcatcaatgcgactcgtcgtctcctcttcagtcgcctgcggcacatgaatcaccacatccgcaatagtattaacaatctccaacaacttgctaatcatcgacgagccatgcacccgaatcgtattctgcgagatcttcgtcaaaaactgcctgagctgactcgacaacctcaacggcatctccagctctaacgacggacacgacgcatgcgaactaagcaaacaattcgacatggccaactgccacaacagcgtccgcatccactgccgcgtaaccaccaaatccgcctgctgcagctccgacagcgccgaaacctccacctcccacaccgcatcatccaactcgcggtgtttccgctccacccacgacgcagtgacctgcgtgcggtccccaatccacagactcataaacgacgcatccagcatgcagaacgtcttgatcacctgcgtccagccgagctggatatccgcgcccacgaacgcgtcttcttccgggtactgggtgtgcgggggcagtgtcaccggggagaaattcacgatggataggaatcgctcgtggatgaagcattgccagtacagtcgttggcggcgggctcgctcagccgtgctgaggctggcattgacggttttgtcgctgatgcggagcatctggatcatgctgattgcttcgcgtaggtggaagaagcctagatcgtagtggcctaggctcatggcgcacatctggatgaagatgcatgtggtggcgcgtaggattgacggccggaagcctattactagtggttcttgggtttccacggactggcgcattaggtctgttatttgtgttgaggttggttgggggctggatttggtggtgcattgaaaggaccgcgtgacatccagggttactgcggtgaaggcgtagatgaaggctgcgtgctctctttccgtgtccatttttgtgattgatgtgcgcacttctgtctcggtgattattgggctgaatgggtatacataggacatgtatgctgggagtaggctttcgaagtatgagcttggtagttggattgaggctgtaggtgctggtggagagagatgtggtgtcaaagtggtgggtttggtgttggtgtttttatatttcgagatgacagctcctcgacgtagtgaatgttttcttgatcgcaataaacggttttctgtgtaggtgcactggagatccaggtgctcgcactgctggcatctttgctggccattacaacgaactttgcggcgattacacgggtcacatgcttttggcactcgtggctgagaagttggactagccatttttttctttggctctcaagagcaagtgtcggaggtagatgtctagtcggaacatgtacttcttctccccgcgttcgatgttggtggcttggcacttaagactctttcagcgtagcgtcacggggttattctccgcatatatgtaccggataattccaatgagtatctatttgtgagtacatctgcgcttcatcgatatcgcaaagcaagctaccgaccatttaacctcacgggtcaccctcccacatgctgtgtatatatgtatagcaggggaaaaggaaaataccaaaaaaacaaaaacatacaacagtgaggattcgctggtggtcacccacccaactactaacacaccggcgtgtggcttgagtacggctgagcggacgggaagccctgttttccacaccctatggtcgtatgtaccagtttacgtatcagaaaggattaaccaactataggatagttagtttataatcaactagaagaggtgggtgcacaatcgacagggtgagaatcgagctccatagaatcccatgtttgagaagttgtaacaagaatgtacccctttggtcggtagctatgacaagtatgtcctttaagcctagcgaggccatatacctcgttcgacatttagtataccatccttctgcctcaataactacttgcacacgtcacggcatataaccagtaaagtactcaagacgattcttcctttttgacagctggtataatagtaggagggggccacttaagagcacccactgtacatacgtcgatggagactcagaaatttcacgtgactctcagtctgtattcaactgccaatagcacagtttgaaaacgataccacgatgtcgtccaaaagtaccgtgcgactgatgtcgccaacgtcgagtacgctgcgacggacctttaccttggcgtcatcaattatttctactattctgcggctatgccaatatacatacaactcgattgatagatcgaaagatccacctcaggggatctgcaccatctgcgacaccccagagtgaaagctccaccgttgtgaattgtctccattcgaccacgtggtctgcatgaaataccaatatcccacactgaagaacacgtatgactcggggttgtgccgaatggcatccgccctggtcatcccatatatactggttggcaaaatttcgatttcatcgtacttatccttgtaggcttcagttatgatttcgtcggggttctcaagcagtagttgctgacggacccaaaggtcttgatgcgagaaagcattagctagcgagccatatagcatcaaggtgattcaatcccgtgaaggttgcacttacacgtaacgtcaggggtgggatcattgcccagaaccaggtgaaacaattcatggtagagcgttgcgctgcgcggaaggacgtccgtcagtttcctccctcccctctgcccgacaagaggactcttggacccaagcttcacgctatatcccggctcgctaaaggacccttgacacaaggtgatcgtgggcggcgtggtcatatgctgcgtggtgcccatgttggcaccgcgcgccacggtgcagaaggtttgcccatcatagtcatcgtctacgaggtactggcccaggtcggcggaccagtaagggattcgctcgttcttgatccaaatcatctggtcctcgtcatagtcccagaaaaggtgcctgtactgatcgcagttttcgatcgcgaggagatgctgttgcccattgtcgtccattgtccagatgtcgttgccttctatgtcccgggcaatgtctgtccgtgcacgcttcttgagccagttgtcgttgcagtacaagcgtggtgtgttatcaagtgtcgttcccgagaggaagttggacactttctgtagagaacctggaagcagaccctgttagccatagccatcctcaaccggagatttggtggagtcttgtacctttgataagcgcaagcgctgtcgcatcattctctccaacaccaaagtacgcccggaggtatcgcttggcgacatcgtgctgggcagcagaggaatcctgcgcatgcgtgatggcctgcaatccggcggtagctaggtctttgctttcttgcaaatactgcgcgagcaatgtcgatctttcgctacagccacctgcttcatcgttatcgagattgactttgaacaatgagccgattgtctggcccgcagcaagggacgccgcggaaagcagcccgcacacgacaattggcttgagctgcatcttggatttggtcttcctatctccggaaaatgcaacagcagcgaggaagaagattttgacctgaccaagtgatctttctgttctggttgcccctgaaagccggcggaagcatccatatccactagtcgccgaggcgagactgcgcgagattagtagtaaattgcatacaacatactagtctaccacatgcagtggtatctgcaagctaatagggccccacaaatggggtctatgtccacaacatcagagctgcctcggcaacgaaccagggtcactatccctatctatatgatccatatctaccggaccatttgccatctcctatggagtgataattggtactcctcaaacgccgcttctctctgccactaggaccagaatgccttccatgcaccccctttccctcctcaccgccatcttggcctcggcgctggccgagtcctcttcgtcctcctgctgggacaccatgcacaactcgaccctcgcggtcttcagcagcgcccctatcgccttcagtctcgaccgtgctaccgcgttgcagtgccaagcgtggtgcgggcaagtctccaactgccaggcatgggtgtttgtcgaccaattgctgcaatgcgacctccaccgcgcggccccggtgaacgttcttcccgagaccaacggattcgtcttcggtggctgtgacccttccggcgcggtcctggatttgccaagactaatatacgccgagactatggtcgagggcgcagcctcgactcccactacccaggctagtgcgatttcactcgccagcagctcgagtggtgctaccccggagaagactcacggggtgcccgagtcggtatgtctctgttagcttcccagctgtgacccaacggttgactgactcctgtttttttttctcgattctagattcatccgaaggtgaggcgccatggccactcgcgccattcgcgaaatcactggcactaagccaggcggacgacagcccagaggctcaggggcgtgattggagatacggataccgtgtggggcccatgtcatgcgggacgtacggaaagtgtggtttgcatggagaagtatgttaagcgaggtggtatttgggggctagtttttgttccagtaaaacccttggcaactttagcgtatcagttgaatatccgtaccgaggtactctccattgaagacccacactgcttgagaaaccgtagatatgggctcgaacaatcgcctgtcattcttggaaatcggggatagataacccccaatgccggcgaacggtgattcagggacacatgggtggatactgaggggcaccggcgtcggccggatgaacagggtctttccagataggtatcaactccggagactagccctagtacatactccacaccggtatctataccatcagtagcgtcgtcgatggtcaaattgctgttccacggacgtaatcgtcccggattcaggggggattcaatatagcgggctcattcgaaacctggataccggcagaaagatccagatcaggccccagaatgggctgccatatatacaagaagagaagctcgccaaattttgacttcttccccctgttctcattcttgtttagcgccctccgccatggtctccttgctggcttgggccacggtgctgctgctcgcctgccgagtgcagctgcaagtacaggcagcggccgtcttcgcgcactttatggttggcactccgccgtattctctgtcgtctgttctcgctgaccgtgcaggtcacaaacacggccaactatacttctaatgactgggagaacgatattcttctggcgcaggatgcgcacatcgacgcattcgccctcaacatggcgtatgccgactcgaccaacacgggtgccctcgctgccgcgttttcggctgccgatagtctcggcttcaagctctttttctcctttgactacgcaggtaacggcgactggcctaaagccgacgtgatcaccctcattcagcagtacagtgctcactcgtcctactacttctataagggacaggcctttgtctcgacgttcgaaggccctggacgcgccgacgactggcccgagatcaaggcggtcaccggctgcttcttcatccccagttggtcctcgctcggagccaagcctgccgtggcgacgggggtcgtggatggtctgttcagctgggcgggctggccctggggcccccaggacgcggacacctacgtggacgcctcgtatctccagtatctggagtcgctgccgtacatgatgccggtctcgccgtggttcttcaccaaccttcccgggtacaaaaaaaactggatgtggcgcggggaccacctgtggcatgatcgatggcagcaggtcctatacattcaaccggagtttgtcgagatcatctcgtggaacgactacggtgagtcgcactacatcggcccgctgtacgaccaggccatggaagcgtttgaggtcggcgaggcccccttcaactacgcgacagaaatgccccacgacggctggcgggcaacgatccccttctgggccgatatgtataaggatggaacggccgaggtgactgaggagacgattatcgcctggtatcggcttacccccggcgcggcctgtgacagcggcggcacaagcggcaatacggcctcccagctgcaggttgagttccccccggcggagatagcccaggaccgtatcttcttctccgcagtgttgggctcgttctcgggcgccgtagtgtcgattggagactggacccagacggttgggtggttcgatgtgccggatgatgatgtcggggtatactacggcgatgtagccattggcgcccatcggggtccggtgactgtgtctttgatgcgtgataatgtgattattgcgacgattgagggcaaggccatctcgtcgacctgtgaacatggagttcagaattggaatgcctgggttggaagtacgtctaccggggagaccgtgtcggcacgaccgacccgtcttctgtcagagcaggtctgcatgaacggtaccggcgcgaataattttgccggactgtgtgggtttgcctgccgatacggatactgtcctctgggcgcctgtacctgcacgcgaatgggcatcgggtacgagccgcccaactccacgggtgtcctcggatacccgattgtgggcgaaggcgcgagttacagcggactgtgctcgtttgactgcaacctgggcttctgccccgagagtgcctgcggcactgtggaggtcccgctcagcacgccgacagtctcgccgttcctgccccccgcctgtgtgtccggttcgggtgagggcaacctagctgggctgtgcgactttggctgtgcccatggcttctgccccatgaacgcgtgcacctgcacggggcagggggcgctaaatgtcatggatccgacaagcgagaccgttgggaccgccgcaccgggagtagacgctaccgtctacggtcctctgtgcgagtacacttgtcaacgcggatactgtcccgaaggcgcctgtatcgtcgccgaggactcggactcgggctcggggtccggggatggaccaggcgatggcgaggtctacattgccccgtcgatctggaatatgccctcgccggtcgtgcaatgtgagcctccgtgctcgctgatcatgcctccgctgcagctggccagcccttctgtaatatccatccctccctgggagagccccgtcgagcagagttacttgacgaccagaacgactacctatgacgacggagtcgtcgaaacatacaatggctatgcggttgccaccaccaccattaccatatcctttcccccttgtacgtgttgagccctcctccccaatccaccctcactgacagtccatcatcagcggtcgtcaccgagatccccgtatggggagtgaccatcaatgccagccaggctcagccaaccgagttggaaatgacgaggagcatcaccctgccctatatggtatggtcgcttcccccgttcgatgaagaccccaacgcgacaagcatgacggggacggtccttccgcccccatatccatggtcccaggccagcaaggactccgagctcaataccgcgaccaccacctggtcgtccggcagtgcgactcccacggcagataggggtaacccggacgtcggcgtctcgtgtaagccattctgccacctgtgtctcttgtgccgcccagactggagcgggggcggcggcgggggctccgacgatggcagcaacagcaacagcaacagcaacagcaacgaggacgagtgcagcacgcgagaggcggagatttgctctaccgtgtgtgtggccgggtccgggtgcgagttcgactgctccacgaccaccggctgttccgtcacggcctcggccaccagcaccgtgggcacgcccgcgcccgccgtggccatcacgctggagcaatggcctgaagccaccgaggagcccgatgcagaggtgaccagcatcgctcggtcgctcgactcccggctctccgccctgtatggagacctcaccgtcctaacgggatacgaggatggagccgccacggccacggccaccagcaccagtcgcgcgaccacgacgaccagcgcccccccggacctcccaacctcactttccgacctccagttcgtgatcttcctgcgcaaacccgccgactccctggactcctggacctggtccggctacctcctcccgacgtactacgacgaggagtacgtgtgcaacaacgcgtacgaggttgtcacgagcaccgataatatcccaaatcaaacggatgaggactccgactacggatacccgatgtatctgggtccgtttgccgcgcaggatttgaactgtgggtatgtgtcccaaggcctgacgccgggcgacgtgcactgcggcactcaggtactgacgtgcctcgagcttgatgcgctgcatgctctggggtatccggggtatacttgtgggaatacggagttttacatgcaggcttggtgcccgatggcagactaaggccggtggttgtgtaccataagactgaatattattgcgtacgagaatcggcgtcgtcatgtaatgtggtttaccccatcagcttttcgtgccatggagttggttttcccgcagaaaatatcccaaagcggtaactttctgccctggtggatccaacttcttctgtgcggtccaatattattggcatccacgaatatgaagcatttggcaccatacaaatttaattatctcaactttttcaggtggtttactggctctctccgtcatgcatgatgcatgaagcaatttgaattaattctaccaccaccaataataaacacggtttaattccaaaacagtcatttagatactatatggtagagagtagccaattgattaagggcattgttgcttatgcccccccccttggatgctcacaccctcccctgccttaaatttcagtaccgccttcctgatcgggtaccactcagaatactttattttttctgccatgtattctgcctacttctggtttatatagtaaaaagacatgcattttgattagaaaaaatcgtatattcaacctgatttctatagaattcaaccccttgctggatgagcagttgatataggatgtgacagaagtgacttaattttggtaggggtttacatacaaaccataggtacctgctgtcttgctactatcatatatgccgtttagaacaaaagcggtatacaaattaggaggcggtgaggagagcggtaggcagaagcaagtatcgaggtaagtgcttaaccaaattaggaaggcggtactgaaaattcaggcagggggtgggggtgagcaacaattcccttgattaaatgcgaccggcaattcatcataattgtagtaaaatagaattaaaaattctttattgttggtggtggtggtaccatttgaattacatactccatggtgatggctttatattcatatatgacggagagagctagtaaagcacctgaaaaagttgagatgattaaatttgcatggtgccaaaagcttcatgatcatcatagggcctggttaatccgtcccggcatcatttagataactacctaaaagcggtctaagataaggccaaaatccaggcatcaaggcccaatctgctgtcggagcgagaaatacaccagttattcttactgagaaggtgtgcacctttttggcctagtggtaacgtggcctgtttttctccgacatctggtgaaaacgacccctctttcctgccgccccgagtaaagtaccaacaacctatgtcggtcaaagcgaatatttcaagacagaatgagcaccatcgagcagtgtcctgctgagacaattgataatatcgtctcgtttctcaacttgcgcgatatttgcaatctccgcctcacgagccgcggtctggcactcagggtcttcggagccccgtctttcggatcccacctagagcaaagacaggtcgacgttacggagcgcagcctccgggccgtagccgaggcaacagcaaagcccggccgactaggttgcttcattagcgacttggtactggtcggcgtggtgaacaacactaaattcctcacgcaagaggtcaagtatactacaggggacgcaggacatcgcgcaaagcagcagcaggacctcgagatcctgactcgacggcaaacagagtatgaaaccctacatgcgtctcgcggtgatattctcctgctgagtcagatattccgcaacctcatggcccatggtaggcgccggggtctccgctccttatccctgacagtcgtggtgtatcgcgaggacgcgcagacgagactgctccccaaagacgggttcggctggaccctgatctggcaggctgccgccgacacgttccttacggcgctggcggcattcgcggcaagtgggatcgcggtacagcggctcgacgtctacaacagtatagagcggtgcagcctagcgtgtaacgagcctagtgccgtgaactttgaatacaatatgctagcgacgtcactcgcgtcgctgaaaacactcgccgtaagcttttcggatcgggttatcaatgaaaggacagaggatctcggcctaacaggcgacccatcggacacgtgggacgagcatttggaagatgagttgagggaacgtgaagatatagagaatgaggtgtatcaggattcgacgtttactggcctccccgccctggtacaacgctgccgggggctcgagagtctagaactccatcattatcaacttaaggatctgatcctctcggaagaggatctgatcttctcgggactcaaccggtaccgtgaacgattcttcccgtacatagccgagatgatcccgctacctcccttgaagcgcgtcgttctccgcggattacgggtgagatcagcagatatactagcctttatacagaggctacagccaactttaagagagctatcgctgcagcacgtgattctcctcgacggggcaaagttcgaaactatcttcggctactgcatatctgaggaggctggcttggagcggttgtacttggaccatttgctggagccagtagtgatggctagtggcgcgtacaactaccgtcgactggtctactttaccggggaacctaaccaggagcctaagctccggcgcagggacctcccacaccgcggtagtaacacagtggataggataggtgcagcacaaatcaggcggcctattccgtacttctcagtctctgtcccaatgagagaaaggggcaataggcttggcgcccattatccgcacagcaggccttacttgtctctatgtctttacgggcagcgggattatggacccccatgagtcggtacagtgatgtggcatgtgtatatatagtatagcttagatagtcgattgttttgatagagcacttcagggcagtatcaatctcagcgagggctacaaggatataggattgtttctcagtggtttactatagaggtttagaagtagactatagacgtactaagtcagcgccacgggaagtgtctttcctttaaaactgggcagtttcacataagcttaagggggcgaagcatgggaatggctttgtcaggcccgttggtgggcggtgatggcggtgagggagttcggtgctcaaatccccactggacatacgtcgatggagactcagaaaatttcccgtgagtttcagtctgtattcaactgccgatggcacagtttgaagacgataccacgatgtcgtccaaaaaagtaccgtgcgactcatgtcgccaacgtcgagtacgctgcgacggacttttaccttgcggcttctgccagcggacccagcttacctgcagacgtgaatacgtccggaaaaagcgcggtccgaaacatggcagtggaaagaagatagaagcactaagggctgctcaatcacatgtcaaggaatataataatagcgcctgccaaccagtggaggatctcctatctccagatcatttgccacggctgatgagacgctgtgtcgacgtctatctacgtcagatgtacccgatcatgcctcttttcagaccatctattctaatcgaatggctcaatcgaccgatggaaccaaatgagcaaactatgttatttgcgctatgcgcattggtcaccgcgtttatgtgcggtcgcagcgaatccattatcgggtgcggagaatgggcatcagtcgcgcatcggttgatagaaaagagcaattcggtgcggtctgaatataacttcgtcggggacagcactgttttgacgcttctagcatctttctttatcggagttacgcactttgaattgcataatgctcgacaaagttggttctacctccgcgaagctataaccttggcgcaggcacttggcttgcacacggacgagttctaccgtggcatggattatataagcgctctgtactgccgtcgaatttacaacattctgttcgtcacggagagatctttcgcagtagcaagacataaaccggtccttctacctcgcccgttgctttttcctgctcccgggccgaacgatcaactagagggcctagaagaacagccagaaattgacatcggattccgccagcttgtgcacgtttattcgcagatcgatgtcaactttttggacttctggagtgaaaaggagacaatcggcacaacccattcgacatggaaccttttttgcttaaagttgcttccggactgcgtcgtgatgtctgacgctcataaagctgatatctttgtgacccagcactggcttgacctggttctatggagagcggcccttcggcaggggttactttctaccaaggcgggatcacggtctaggacgttttcttatccacaggatattgcgttatccttactacagacattgacatcgctctctaaagagtcagtggcagtacatggactagggattgtatgtgtcacaacctgtttctacattcgcctgagctaaccgtacgtaccagttcgaaaaaatatacgacgtaggcaacactctggctgacttcatgcattgctcaagaaatttgacaggctggacagaggcaatgtcacagaacatggaccgactagactcaattcaaaaacagctctctctaagtccaaactcccacgataaattcgccctgtctctaggaggacgattggctgagtattctattttctttggtagcccttttaccatgtataatttggtcattagagacgaagatgtggaagaccaacgggatgcatacaccctggaatgaaatatttatagtcatgtgtatttaatgtgaatacggtcatcttaattgtggattatgtacaaacatgtctgatcccaaaattctcagttagtaacaaccaaattgttgtcataactaactacttgcggcgaaaccttcgctgaaattctcggagagatcccggggaattgttggcagatcaccccggatcgtcgagccaatcgctgaattgctcgctgaatctctcgctgaattaagtctctcggaaatttagaccaggaatttgatatcaaattataaatatccttccagagtgtgtccaaaaaaactgcatgccgaatccatgccgaacagttgaatcatggcctttccgactaattctgtcgccaaccctcgggccgtcatttctggtccgaaatatcgctttaccattctgaccgatttcttgattcggtacgagtgggcttctgatggatgtttcgaagaccgagcgtcaactttcgccatcaaccggcactttccgacgccccaattccgcgtcgtcgacaacgatggtaatctcgagatcatcgccgacaatttccacctatgttacgataagcaacgattctcccctgctggactgaacgtccatttcaacttcaaatataccaactggggggctccatggcagtatggactcgatgaggagctcaatttgggaggcacagctcggacccttgatctttgcgatggccgttgcgatatgggaaaaggagtgatttccaaagcaggatatgcggccctcgatgactcaacatctatgctcttcgatggagactttgtggcgggtcggaaaccgggtgatcgtatcgatggataccttttctgctacggtcatgactacaaagcggcgatgaaagcattctactcagtgtccggcaagcagcccatattaccccgatatgctctaggcaactggtggagccgatactatgcctatcaccaagacgggtatgttcaactcatggatgagttccgtgcacgcgatattcccatgtcagttgctgtggtcgacatggactggcatctcgtatcagacccttctgtaccccatgccggatggaccggctatacctgggataagaaactcttcccaaatcccaagcagttccgacgtgatctgcacgagagacatctcaagatcaccctgaatgatcatcctcacaatggaattcattcccatgaagatgcatacaaggaaatggccaaagctctgggtcacgataccggggaaaagaggccaattattttcgatccctctaaccccaagttcatgaaagcgtacttcgagatcctgcatcgtaatctggagaataccgcatgcgatttctggtggattgactggcagcaaggcccgtactccaaagttcctggcctcgatcccctttggcttctgaaccatttccactatctcgatcatggacgagatggcaacaccactccccttatcttttcccggtacgccgggcctggaagccagcgatacccagtgggattctcgggcgatacagtggtcacctgggattcgttggccttccaaccggagttcaccgcaacagcgtcgaatgtaggttacgggtggtggagccatgatattggcggccatatctttggaggcagagacgacgaactcgttactcgatgggtccagctcggtgtcttttcgcccattttccgtctgcattcttctgattcgaagtggaattctaaagagccgtggatgtatcgctcggagtacaagaaggtcatgtctagctttatgaggttgcgacatcgactggtaccattcctgtatacatgcaacgttgtcggttctatcgagaatgagcctttagtgcagccgatgtactggatgtttccggactctgatcaggcgtacgtgtttcccaatcagtatatctttggctcgaaactcttgattgctcctattgtcgatcctcgggacaagacgacaaacttgggggctgtcaaagcatggctgccacccggtccccggtttgttgacatatttactggccaattgtatgacgcagaccgggagatcacattttaccggagactggaagaataccctgttctgagccgtgaaggaactatcattcctatggatgccagcccagcgcccggaaacggttgcttgaatgtggaagcgttcgagtttcttgttgtcatcggcaacgatgctgaagccattgttttggaagattttgaagacgatgcacccaattcgacggcaggccaggggcaacggaaatttgctgtccacttcaaccaggctgacggaaagctgaccgccgaatcaatcgaccggccctcgaaattccgatttgtgtcgttgacgtccattccggacaacttgaaaatttactgtgacggcatcgaccggacgaaagaggttaaagtgtccgtcgaggagggctgccaggcccctggtctcgtcattgaatgctcattctccaaaattggtcactgcatcactattgaactcggtcctaatcctcagctcagcgtgatgaatccgatgcgccgtctcgagcctctgattatggactatcaatgtgagttcgagattaaagacaagttgtggaaagtcgtggcagaccacatgaaacgtgttaacgctatgattggcacgctgctatcgcttgggtacgatgactctatcgtcggtcctgtgtttgagcagctgttggcagatagtcggctatgttcgccttttgctaagcggacgtaggccgacggatcagctgtatgcacctcaaagggtcttaagtgtattttgactaagaagttcaatttatgatgcacgttttatcctcagtgtaatgcttgtattttctacaacaggatagactgacgagtaagatcatggtgtctacgcagaaaactgatagaaagatctgtttaaagcaatcaatgaagtatatttgattgcaatctgccatgatgatgtcctctaagcaatctaagtacgagtatctaaagagtaatatatcccagccctaaaccaaaaagactcttccctcaaacgcatgcaagtcctcattgtgcccatctacattgctagccaacaatttccaattttcgctcttcacggaatcaggtttctcaaacttctgtgttgtatttgagaagttgagaacaaccaaaatggtctggttgtgatttgtcttagtataggtgaagacactctgatttggctcgtcgaggatctcaaactctccaaagaccaggagatcggcatactcttttcgcagctgattcatctgtttccagaaggaaagaacagaagatgagtctttctcctggagcttcacattgatctcagggtaattgtcatgcgggcgcatccacggctttgccgatgaggccggtgaaaagccagcattggcatcagcactccactgcatggggagtctggaatgatctctcgccaaatgctgcagagcatccatcgccttgctcaactcggctgggtcgttgccggatttttcgcttatcattcgataatagttgatgctatctatgtctttgtattcgtcaatcgtccactcccgaggcgcgttcaccattccaatctcctggccctggtagataaactgcgtgccggagagagtgctttgcatcatagcaagcatctttgcagaccgaaccctcaactcgggtgtcttgtcagagccgaaccgactcacagaccggccctggtcgtgattttccatgaacactgtggtccatgcatcagtgtccttgatgatatcttgtgtatttttcacggcggcttttagttctcgtagattccagcccggaaaattggtctggaacttatagtccttgccctggccgaggtccacgatgtcgaattggaagaccatgctcagctgcttctctgccgctgagacatagctcagaaccccttccaaggtatgcgtgtttggcaattcaccaacggtcattgcatcatatttggaaagcacgtcgttcatctcgcgcatgtactcgtggatgcgaggaccgttgcagaacagcgaaaaagccggctgtgtgtcggactttggatcaaggattggagcattgggatagtcggggtgcttgctgtacatgttgaccgtatcgacgcggaagccatccacgcccttctgcagccagaactccatcgcatcctcgtagactgccttgcgagtctcggggttctcccaattgagatcgggctgctcaacacagaacagatggagatagtattcttctgttgtctcgtcccacccccacgcactgccaccgaaaacgctgcgccagttatttggcggctgacgatttccattcgcgtcgtatttagctggcttccagatgtaccagtcgcgcttggggtttgtctttgaagagccggactctttgaaccatttgtgctggtctgatgtgtgattcacgactaagtccaggataatccgaagtcctcgcttgtggcatgcgtcaatgagggtatccatgtcctggacagtaccgtatgggccatatacgcttttgtagtcggcaacatcatagcccatgtcaatctgcgggctgtcgtacatgggacacagccaaattacatccacaccaaggcttgtgatataatcgagggatgagataatccctgggatgtcgccaatgccatcgccattagaatctttgaagctggcggggtaaatttggtagatgatggagtttttccaccacttttcggccactatagagggagacatggtgaatttaagggatttaaatgcaaggaatagtgatagaagaagaaatataggtccaaaatacgaaaaactggggaggctatatatacgtgtctaaagcattcgatttttgattgtcattgcactacctgctcgactatggagtctccgatatcacgtagggagggccattgctctcattgactcgatgtcgggccgacgatcatttcagcagaatcatgtgcccctcatctgcctgcgggtctttctgtgctgaacgagggttggtggtgtttcagtatggtagagattcccacttaatcccacgatccggaaagcataccgagctctccaaccgcctgaccatatcagatgccgagattgtctatgccgattcgtctcttctttctgggcctaactcacaatgcgttagttcatcgcagaaatgaggggaacagaagcatgtcgggccgacatctcaccaatgatcccgtgatatcccccagccctatctaaccggatcgggaaaagcaacagccctaaaacggccataagaaacacgcgagacacggctggatgaaaggagccaatgcggtgacaggactaaatgcctcttcattcctgcacggcccgacatcaggccaatcacgactctcccagaaaatccggggatagtgggccaacctataccccatgctggtgcagagaaaccggggaaagtctgcacgcgccacaactatcgcatgtcaaatggattaagcaagaattaagctcgacggacgaatgggccaatggaacggtcctttcgtcgctcgttatggactactgtcgacgaccattagcagcacggttttgcatataaatgcccaacgacgcccgcatggaatacttcttctatccagtcctgtccaccttgaacaacaatctgaatcatactcagagcctccattggcacatctcagcaatggcttctgaaaagcaagccaccgatcatgtcgagacatatacagatgtcaagccgggctacacagacctccaaaccagcaccgaagcccacgccgccatcgaaaaagaacacaaaatgaccgccatggaagccctgcgactctaccccaaagctgtagcctggtccctcctcctctcctgcgccatcatcatggaaggctacgacgtggtcctgatcggctcattcttcgccttcccagccttcagcctgaaatacggcgaactcatgtcggacggcaagtacggcctcgctgcctcctggcaagccagcctaaccaacgcgatgagctgcggccagatcgtaggcctctttgtgaacggcatcgtctccgagcgctacggctaccgcaaaaccctaatggcctgtctagccactaccgtcggcttcatcttcatcctcttcttcgcatcaaacgtccagactctcgtcgccggcgaactgctcatgggaatccccctcggcgtctaccagaccctgacagtcacatacgcatcagaggtatgccccgtcgcactacgcgcctacctaactacctacgtcaatctgtgctgggtattcgggcagcttatcgcttcaggcgtgctaaggggtcttgtcgcacacaccgaccagtgggcgtaccgcatccccttcgccatccagtgggtatggccggtgccaatcttcatcggggtgtacctggcgcccgagagtccatggtggcttgtgcggaaagacagacgcgaagacgccatcaagtccgtgaagcggctcacgcgcgcagaccccaatttcagcgcagaggaaactgtctcgatgattgtgtatacgaatgccatggagcagcacgccgagactggcgcctcgtatatcgactgctttaaggggactgacctacgacgcacagagatcgcgtgctgtgtgtgggcagtgcagagtctatgcggcagtggtctgatgggatactcgactgtcttctaccagcgtgctgggctggcggacgagcagtcgtttaccatgtcgctggcgcagtatgcgattggggttgttgggacgtttagctcgtggctatttatgacgtactttggtcggcgcacgctctatgtgggtggcctggctatcttggcggttatcctgtttgtgattgggtttgcgtctgttgcgccggcgactacgtcgctctcgtgggcgacggggtctatgctgcttgtgtatacgttcgtctatgattcgactatcgggccggtgtgtttctcgctggtttcggagatgccgtcgtccagacttcggacgaagacggttgtcctggcgaggaatgtgtataacgtgcttaatctggtgactgggattattattccttatatgctgaatgtggatgcgtggaattggagggggaagtctgggtttttctggggtgggctgtgcattctctgtcttgtttggtcgttcttcagacttcctgagcccaagggccgctcttatgctgagttggatgttctgtttgagaacaaggtgcgcacaagggagttcccgtctgcgaagacgggtttggtgcagagtgagctcgagggggcgaaaggctctgtttgaggctaatatctgagagaagtattggaagcatagtgacatgtagtatcgtcagtgaaatgaaatctcatcttgttgtaaccaactcctgagatctttgaacgccttggtagagaatattataactagaagcccatttacgaagacggtttctttcaaaacttctaattctgctaggaaatgctgttcgtacacaaaagaatatttgcaatcaaaaaaaaaaagacaagaagcagatgagtataatcattagaccaggtatacgccacctatgacattgaaacaaggaaacaattttttaagatcccagtcaaaaactgatatatcagttatccaccaagaacttcattctgatacccatagctgccaactcgacatccaagtagcgcagcacaccaggcacagcaacgatagtaacattgtcgccaccgacgtagcggtgtccatcaccatcttcccaaacctcagcacgggagtcgtcgaaggtagcctcacgggcacaacgacggcaacgcacaacaccattgacaccgccaacagcaccaatagcagagccagcatgagcattggtgttctgctggttaggagcagccttggcagccgcagccgcagcaccagggttgatagtagtgcgggaacgggacgagccggaaacagcaacctgtgtagacaagaaggacccacaagagcgacagatccaggtgtgctgggcgtcggagcagttcatgagacgatcctgcagcaagaaggccgcaccgtgagcaatgagcgaatcacgctccatctctccgacacggataccaccacccttcgcacgacccttcacgggctgacccgtgagcgcgttgacgggaccagtcgtacgcacttggaacttgtcgttcaccatgtgacgcagacgctggtagtagaccaggcccatgtaaatgtcggcggagaactcgcggccagtgacgccactgtacatcggctcgttgccgtagtagttgtaaccggctttgcggagctgctcaccgaagtagtcggttgcggtgttttcttcggagaattggaagggagttgagtcttgcggtagaccgtgcatagcaccggcttttccggccatggactcgatcatttgagcgattgtcatacctaggatatgttagatgggaataatttgatattatgagcgatgggagcttacgggatgggaaagcatgagggttgatgatcagatcgggctgcatgccgctctcggagaagggcatgtcgactgcaggccagagttgagacaacacacccttctgaccgtgacgagaggagaacttgtcaccaatgacaggcttgcggggaatgcggtacttgatactgagcgattgagcaggctcgttgccagactcggaaccgatgattcggagactctcgacgtagccttcctcggcatccttgtatttcatgtaatgggtgattccatcgacgttaacgtacgagtcggaggcgggatcgaatcgcacactgtgccaggccgcgatcttgtcaccttccttgacgcgagcacccaggtgcggcatgccatcttcgtcgatgatgttgcgcacctgctctttgacctcgtcgccgggggcaaatccaaacagcttggtgacctcacgcttggacttattccgacgggagtcgttgtcggctaaagtgacgaccttggtcttatagactgtaccgtgaccgaagccacgttcatgtgcggacttgttgataatcatagcgtcgtccatgtcgtatccggtgtaggagataatagccacaactgcgttcataccgttggggaagttgtccagaccgtaggcgttgtagagaggtggtcgcacaatgggcgtttgacccgtttggatgcggtacaacttgttgtcagtacggtgagcaatcgaggtacctggcgtacccatggtttgtttgctcatctggcactggtacatgttacgtggagattggttgtagtcggagaagggggtcatgttcgcgacaatagagaggatgttcgtgggcgtgaactcaatatgggtcgaaagaccgggaatcaggtcagactccacacatgcaatctccatgaaaggctgctcgaacggtccgacgtaatccagcttatccagcgccaaatacttaacagggcggtacattctcgctgattgggagaacatgtagacacctgggtattgtccaccgcttgagttgggaatatatccaatttccaattcacgagggatgttgtttttgccttcgaccttccagtaccggatggtatcggcgattctctgggcctgcttgggtgagcagtaaccaatgattcgtccatccaactggacaacaacgctctcgtccagagccacggaggactcagaccggacaccaagttgaaccagagtccgaggcagatcagatacatccagattgtcagtagaaatcaaacacttgtgcgacaaatggttgagcagaccgcaaggcgatccatcaggagtgtggacagggcaaaggaaaccccaactttccggtagtagtttgcggacagtggtagtcttcaactgggcgaagaaactaccacggtgaatcatgcggaaatgactgatgaaacggtagaagttgatcttctctgcaatgacggtgtaacctgaagtttgttgcaaatcaagaccagtaggactgatcaagttaccggtggagaggaagtactcgagtgcattaccaatattctcatttgatctcttgacgatcttagagaggaagtcgcgctcaaatgcttcatcagtgaaccttgcgccgttgttgcggatggaccagtctctggcaatgggaccgaatgaacggagccactcctcgatacgttccttgagaatcattccgtaaaggaaaccaccaagcagaatttcctggttggagacggcatcgggattgtcgggggcacagtctcctgcaactgtagagtaaagcttgcggaccataaaggtgatcaacttgaacttgtcccaatcttgcgcctcggtgacatgctcatttccaagatgagggagaacaaccttacggaggaactctgtgccaacttcctcgtcaggcatgtcagcggggactccgagtacaggtcggaaagccttgcccaggtgagatcgacaatcgtactggctgtgcttctggtaggcgtggtaggttctcaacaaaagctcgacacggtccgtgacgaaagtgttgttcatgcccttggaagaagcaccaccgacaatggcctcgaagatttcgcgatcgttagtctcggcgagtgccttgagaatcatcatcacggggataaggtattcattcttgcgccatgagaaacggaaggtgacatttccgtcggagaggtagtgaagcacgtttgtctgcgacgtttgatcgggacggaccgatcgtatttgaacaccgaactttgtgtaagtctgcccacgcttgacgaaagaattacgaatgatggacatggggtagttgcgcttgccgacgaccagcatacgaatgagcttctcgttaccgttaacgatgtagaagccaccgagttcctccgattcttccttgtgtcgaacaagctcctcgggactagcatgttcgaggtgacaccggttggtgcgcaccatgatcgggacattacccagctcgcggatagactccatccagtctccattgttgacctggtactcgaggcgagcgcggagcttgccacggtacgtcgagtggcgctctctgcattccgaggggtagatttcacggtttcgggtggtgtacttgttggttgggggcagggtaggcttgtcgaggaagatttcacgcacgcggacgttcaagcgattccgcttcggtgggcgaacgccttctgattggcgggccttcttctgctcataggtctcgagttccccatcgaggaaagtcttggtaccgatatccttcaatcctgcctccaggatcttgctgtcttcgaagagagcattgaaggaatcgatatgcggtcgaatcgactcggccagcgatggataagccgtgtgatccgcgggaggattcttgaacaggttctcccgtcgcagggtgtcgtattcgactgaccactgagtgtctgtggctgcgggcgccatgatggaaattcgcagctcttaaaagtcggttgatgcggtatagaaaagaaagactaaacagcacaataaatgtgacccttatatgtcaagataaaagcgcgacaatatcggttctattcctccgcccaatattgtatcagccagaccacaggaattgaaccgacaatggcagctgccaaaagacgagagatgtctgttctgcttggggaaatttttcgagggtggagccagacgcttatcggcacgtggtgatatacattgttggcctgaggcgcccaaatgaggttcaagtccaaaagttcgacgttcaccgttcattaactccctaatgccgtactgaaactctagtttgactgcaagctcctggcatgattatgaagccctaatcccagtagactctagattgatcaaacttgcaccactaactgctagaaatgtgggaacttgtaactacgccacacgggctggctatgctgcacaacgccattcaccccaagctgaagccaatggagactaagcgccctgaggtcatgtgtgtaggtagatcggccacttctccatagacaaataggacgttgtgtagatccaatatccttttctattgacatctgccggcggttatccccttaaaacatcatttcctctaataataggccttttaaattgtgtcaggttgattttcttgcaacggtgtggcgatcttgttttctctctcttctttttttccctctttctctcacctttcatctcttcgtcatatcgagacatcaccaaggatatatcaacctgttgtgcagttacaaggtcgaccccactctctggcttttgtcatcctgagctttttccacacacacgaggcaacttcctcttaatttctctggcagctttcttttttttagttctattctactgtattgtctcgtttctcttccctcctttttttcattcctttttcataaagtttcgcctctcttcgtcatggccggtatatttcgtgctatctatgactggcttctgaggatgttctggtaagtgggccgtttgatatatgcagtgttcgggtgaccacggcccgtccccgcagatgaagccctgctaaaactccatacagggccagcgagatggatgtcaccatgatcggccttcagaatgccggcaagtcttctctgctgcgtgtgttggcggtaagtcgatctgataaagtcctgacggggtgttgctgaccataacagggtggagagttcactatcgagtaagttatagatggtctcacatctgagatcatttcatctcggccatgtcctgatcgtcttccttgtagctccatcccaacaatcgggttcaacaccaaaagagtgcagaaaggccatgtgaccttgaaatggtatgttcatccttcccgattaagcccggcggcgctaatatatccctcgcagctgggatctgggtgggcaacctcgatttcggccgatgtgggaacggtattgtcggggcgtcaacgcgatcgtgtaagacttcctgctttccccgtcccatctcttcccggcatactaaccaaggtgaataaaggtatatcgtggatgcagcagaccgcgctgcactcccagtagcgacagaagaacttcacgacctgatgaaaaagcccacgctggatagcatcccactcctggtcctcggaaacaagtccgatcttccagacaagctgtctgtggatgagatcattgaggcgatggatctaaaatccatcacccatcgcgaagtaagctgctacggtatcagcgccaaggaggaaaccaaccttgacgctgtcctgcactggctcattgctcgagctagccggtgaggatactgtcgcttgtgcctgcccgctttgaccttcaaccttcaacctcgactcgcgatatcccttttgtttttcatacccttaactgtgccgcattttgattgtgttcatatcccgtagactccagcgtgtttggcccgcagcctcggatgtaacgatgttgacgatgtagtcttcttttttctgctcatggattctcgagttcatgattatgatgtatgtatgttaatggtgatgtgcgcttgtttgagccttcttttttcgtatcgttttttccttggtcgctttcttcgatcgataagtattagggtgttttggcaatactcatgggggaaaaattgacagaaagtcgatctggggatggccgacataaataaacaggggccaccccggcattgatgcgttggctgccaacgcatcgatgcagacgaataaacctccccgccaatggacgtctcacattaaacacatattgattagctgagagctggaataataattcattgtaaatcgttcggatatcattactggccactataccatacatctcttttcgtactagtgtgcaccttcatgtcttggatattattctcagacaaatcaaatcaagtggcattagtcgtacacaaaatatctagatcagttttgtaggtccttccttgcagacaggccagatccggagttgctcaaaaccccctttgaagcgcccaagatagcgcagtaacgcccgtaaacatcaataaacgaaaaacctcacgagtgaaatgcgaagaagatatggaatcatttgcaacgcttctctacaatgttcggcccatgctcctcgtactccttcttggatatccacatctggtggaaagttcccaaactagccaggatacttcctccaatccaggagccgaagcgtcgctcagaggtgttaccgggagcagtaacacggaccctggggccagggaacatttgcatcagctcgtggtttagacgatcagtgaagccataaagcaagctggatccaccggttacaacgacattagccagcaggtggggacggaggtcgacgtcaacgccggccaaagaagccttgacaagttctgggatagtctgagcgggtgtcgggggagggaaagccgagtcggggtctggaatagcagctttggcgtcgaacagagattccactgcgcggaaacggtcaacaccgaagacttggttgtatccatcagggaactcgaatggacgaccaggggtagtgcgagccatgtcttcgttagatacgcccgtagggctgggggctgagagcctcgtaggtcctggccaaacttggacgacacattccttaaactcggacagtgtacgctcctcaagcagagcacggtacgacgcatcgggtgccttgtctgcggggaaggtcttgtatttcacttggggcggttgtccggcttcgacggccgatttcgagctgataaggtaatgcggcgtgattgtgatgggctgtggggagttggccttgaaaattgccttgatctgcgacgagatgtaatcaccgcccaacggcgagtgctgcacaccccgtttcaggatcatgccatcgtggatcggggtaacagagatgttagaagcgccaatgtcaataacaagggcggaggccttgccggaagcgaaactgcgcatggaattgggtcagcaagtggtacacatatcatagttaatgggtggtatacgtacgcagcaagaacaccagtacgcgcgagatagaaggccggtgtatcccatttttccattgcgatttcaatggtcttttcgcgtgccttggccgggttccatccaggctcggtcatcaacaatgggctgtccgacaaaggcttctcttctgactccacctccatctccgtagggagctcgtctgcagaaacgtcgtttaatccgttctggaacgggttgcccgctctcgttccggtgagtcgcgaaataaatgagtgctcccacactttctctgccatatcccaatcttcgacgattccatccttgccgattgggttgtagatggacagaccgggtcgtggggtaacgaatatgtcgtcgccaaagacgagcttctcttggccgtcggcgttgtattttccatagtaggttggaatcagtgacttgggagcatcttcaccggcaaagcccgcgcgagtggttgaataccccgggtctaggacaattgctgacacctcgtctatagtcgcgcgataattagcatctcgtacggtgaataggatggaagcgttctgtggaatcgcagcggcaggcgcaattgggatgggatatctgggatcacatacctccaccatactcggcagcttgaggtgggttggaagggttcatcgcgaaagttgtgcaggtatatctagaggataagggtcgcagctgtcacaaggatcaacgtgaatattttggtttaggtcgcctgaagaaagtcaagacgtgaccatgtgtatcgcgcagacaactagaggggctggttggaggcaggagaagggcgggtctttttgctgcgggtggtgtagctttggctttggcatccaaacgggcagttcaagatcaggcttagtcattccaggtgagcagctgtgctgactaatcagggccacaggtaactacctaaacagagggctttaggacattatgcatggcccttcttgagtcacatcctttttatggttaaatattgaaagtgcacatagtatttctttgaagacagtgtcttatacgagaaaatagagataaactgatgaggcggtgtacataatccgaaatgaagcaaaaagcatctataccgaagaacctaacgaacaagatatcattctatttccctccttttgcttgtgtttgtttctcgcatctcggtgtccttatatgttacttcgatgataggccagaaatagcattagcccgggattattacggtatcatacatgtcgagtaaaaacacacgccgcagagggccaagtgcataaaagtacatatcaaagaaaatcagccgtttcagatgagaataacaatcatttctttcccgcctgtgcttctttctctcgcattgcagctcttgcactgcgactgcctccaagcttcggaccccgaggcgcttcaacattagccacgggttttgctgcaggccgagtccgacgccgagactgcatcgcatccataaagtcgcgcctgaattgctcagcaactcggtcatcagcagcttgttgatcatcaagctgtgtttcctcttcttgttcatcatagatttccactataacagctagtgttagcaaagataaagatcctgtaaaattcactttggaatgccacgtacatttgctctcacgtagtacctcctccacaagacgatcccttgcgatgtctgcatctgtcctctgtttgcgattgcgccatgacttgccgtctgggttagggcgacccgtctctggagcagtatcaaccgatgtcggcaagcctccattctcagtcatttgtcgagtcgcagcctctgttcgcgcaatgtttcgcaatgtggcttcttggccgaggtcgatttcatggagtttgcctagcgacgcaggttcgcgtgtctggtgtccaggtagcgacaatcccccggcaacttcctcctgggttggttggttggaacctgaatgatctgcctttgattcaggctggtagcgcttagccatctcggaatctatgaatgccatccttatctcgttagtccacaccaaacgattcggacgatcagccgcgggaaagaatccgtacatgtgtttgtcaacatccactgtttgaccagtatatcccgtgaaacgttcattcattgcttgtatcttctcgttttcagtatctccagccactggtactagcgctagttgctggccctgatcatctcctagccgtgacgcggtagaaaacccaatgccgccctttcgaattgcgcgtggacgccgaagattattgctccccagagcttgtgacgcgccaggattatcattttgattatcggcctcttcggtgtctaggatctcatggtcgggacgtcgtcgcatgaacttgcgcttttttgctgggcgaaacagggattcaattggcatagtatcttcctgcgtgtccattgtgatttgcgacaatgtaaacttgggtggtaggggaaacgagcgggaaattgattgtcaaaggtgaggtcattgagcaggcaaactacaattcgccgattattgaccgccttctattctgccaaatttaggttcaaactctaatgtgacttggacctatacaacatacaccagatgtgatgatagccaataatctgccctttccatgactactaccgtgatagaaatggaatatccaatcacattgatcgtaaactttatttttctcaaggacgttgatattagaatacattattttgctttgatcagttccgattcatatatcttttcactgattcataatatagcaagggaaaaaccgtctaaatttcacaatgtatagccattcaaacaatccatcttacctggtcacgggcctggatgtcatcgttttgcggttagagcctctcaaggctatatcttggaaagaggtcgccaccaaccttggaagattctctgtgtttataaaatccacttcaattaactagccagagccagtatctcaaatcgaattaaccgaatagccatggtattacccagtctaactaatagtatacctgctcccaatttattacaacatacttcatatgtatttgccttggacagaacgaagactctcatcaggaggcggctgggataataataacttggctttttaacaagcaatttggacatactaccccatatttctttcatagaagagccgggagcttgtaacgggtgatattgttttaggttaaccacagatgatttgagacacgtaagtaatcatcgaaatgaaatgaatctcgggaagtcgaatctcaaaatgccgtgctccatagttaaacgtcatctaccactaatactactactactagttagtgtacctgatttctatatgatttttgcacacccctaattcctcaccgcactcaccgcacacctatttaaactactgcggataaggcgctccttagccagcatttttcgccgaatctgtaatttaatagttaattttagaaagctgttcataccatttctaagcaaaatgcatttctttttactacgtatgtgaactaggagtgggcagaatacggtagaaaactctaccggcatatgtcgcacccgatcaggaaggcgatgactgaattttcaggcaagggggtggccataccccggataatatatatcctagcagctgcttctgtactattgttcagccaatatcagggctctaaaggtgagatctcgtaagagacagttccctagttatagaaacgacaatagtgatatcatcttgtttatatcacgggtgtgtcacggactattttctaacattaatgtctcagattgctcgtttatctctttccagtaagaattaggtggcaaatccatgttctgttcagatcctttgtatattctgttattcaatcctaatcctacccgagtgaagaatctagtcacatcattacatgtaggctcagatcaggaggggatcggcaagggttcacaaaagatgtggctgataggatgaatgcgaagataagcaaggccgtgagataatctaactattgtaagtcacgatccgtgcgtctggtacagagtacagagtaaaccctaagattctcacgggagagagcttgctagttcctcgaaaagacctccgcacgacccaaaaaacccagatgaacctagtctgggctgggtttcgggtcgtgtggaagtctagctgagtaataatatgttgaagaaaagaagaaagaaggttgcttggcaatcctcagaatttccgagttcgggagttctcaggcggaaatcgtattccgtgatataagttcttgtccaatctagatactgcatgataatacatccatcgtatcaggaacatgaccccgggtaggtcggatgctttctggcctaatcaaggattggatttgatgaatgctgcaaataatcaaagtgtgcagcacaccgctggagagaaagccgagaatacccctaggttagggtggctggtttgttgagacacgaaggcatccgtcgcacgaagtacggagtagatgctagcatgttctttagggaaacggctgacagacgtttgctcaattcgcccatttggctattggccaggctttctacctcggtcatgaatatctactccgtattagaccccgcaaataatgttgaaatctctgactgtttgtgacccgaatccgtccacggtgtggagggatcccccatcttgccccggtcttgagctcaacaatattcctcggacatctctcgggaaaaatgtatccaccagagaataatgcaattgttatacggagtacaacatacatcgcaagggatatcgtggcttgcctgactagatcgagacttttattttatttttggcaaagtttcaacgcctcaatgacacaatctcgcacgatctggagggaaccttggaagaaacagtcatcaaaacagagcattttaatttgtaaagctttgtgatgtggaacaatgtactccccgacaaatccttcgattttaattaggcgtgcctgtactccacgggcaaatccggagagtgaccgagatggtggggtgcatgagaatggaaaaaccccagcctggaggtgagattcaaggtcgaggttatgaagtcttggcacttggcacttggccggagtggataagccttcgggactagcccaagcctttcaatgccgaggccggcggtccgagtcaggcaatgagctaccaacacgcgagaccgaaaagacccgggatattttatgatggcatttctcggaaaataaattactccaaacagcttcatccctacttccccattccatgtggcataattcgagcgagaaatcatggggaggatcggcaccccgtctgggctccgatattcggcatttcctccaatcagtccgggcgagcaagccagatcatcccgccacttaactcttattttcggccccaagcctcgtggatctagtccggaagcggtttcttcttcgggagtgacgaagctgcgggatccttttacaccgggaccgggaccacatctaccccgtggagtcggcgatgtgaccgagtcacaggacagaaccggtcacggattttattgaaatttgcccaaaacttgccacggtggatatggatatgctatccactgtggaattcccccatcccacaggtacaggatttcatttttctgatgcggggtctccacgagaagggttgaccgaaaacagggtataaacccatggagagaccggcctccattttctctctgtttctctcatccctcagagtggcctttcacatacacactctaacatggtctcattattccgaggaaaagcgctgagcgtagcgcaggcgttgctcattgtagcaccggccttcatcgtcttcggttacaaccagtctggcttgggccctcttgctacattgcagagctgggtcgaagtattccccaaaatcgacacaatcaacacatcgggcgcccaacgcgcgcaaaactccacaggcaagggtgccgtcatcggatccttccagctcggtgctctgttcggagccttgtcgtgtacattcctgggtgaccgcctcggtcgccgcaagaccatcttcttgggtggtctccttactatcatcggccaagtgttgcagactgcggcttatggcttgccacaattcgtcatcggccgtatcatccttggtctcggtgtcggtcagatgagtgttgccgttcccgtgtggcagtccgagtgcacgtcagccaaacatcgtggacagcacgttgtcgtcgacggtatctgtatctgcttgggttatgttctttgtaactggattgattttggcttgagcaaaattaccggcgcattgcagtggcgtattccattggccgtttccatcttcttctccgtcgtggtcgtgttttcgatcttcttgctccctgagtcacctcgatggctcgtgcgggttggccgcatcgatgaggctaccagcagtctcgctgcctacaagggtctacctgacgatgatgaggctgtccacatggaaatcgccggtatcgaagcttctcttgagagtacggttaacagcgcctccatcatggagatcttcacatccagcaaggccgacgatgagcgccttatctaccggttctgtctatgcgttgcactgcaattcttccagcagatgtgcggtggtaacttaatctcgacatacgtgtcgacaatcttcgaagagaacctcaacatgtccagcgacctggctcgcatcctgtcttcatgtgccatgacctggaagttcatctgcagcttcatctccttcttcgccatcgaccgactcggccgtcgaaagatcttcattatcagcggtactggtatgtccgtctgcatgacggtcctcaccatcaccaacagcttccaggacaacaaaaccgcatccattatttcggccgtctttatcttccttttcaactcgttctaccctgtcggtttccttggcggcaacttcctttactgtaccgaagtcgctcccatgcgtctccgtgtcgccatgtccgccatctcgaccggaaaccactggctgtggaacttcgtcgttgtcatggtcactcccgtcgcactcgacaccatcggatacaagtactacattatctacgctgtcatctctgcctgcattccagtctcggtttacttcttctaccccgagacaatgaaccgcaacctggagtccctgaaccatgtcttccgcgatgctccgaccgcgtgggatattgtctccatggctcgtcacctgcctcaaggcgaggctgctgaggtggatgtgtggaccgggaccgatgaaaagggcgagaagagtgaaattgagcagaaggagaatgcttgaattataaattaaatttgtcgagaccttaccaactgtatatactatgtctgacgatgatgatgatagaatgagttgtactaaagtacaatttaaataaatgtgatcattagattgagcacatcaagaatttcatgattccatatttcattcatttcccttggatctcctataagcaccgtaagtaaatacaatccggtctctgaagtactattgctcctaagaacttggcgtagtcaagtctcatatcatcccaaattgggagattaaacatagttgcctctttcactatgagacatgatatacatagaggttatgcatctcaattcaacataatgaattgtttaagtttatgtgaaaggtggtattgataacccttttaagaacttcaagtcaagttctttgtctcttactctatctataaattgacatactatgttattttcattgatatattctcgttcccattgtttagccaaggttatccgctctacttcgagtttctttgtctttcaaggctacgtttacatccctcgagtcttcaaggtgttgttgattgttcatcctttgttttttattctttaggccgatttctggtgaattggtgtttgatcacgacaaaccttgtaactaacattaaacccaacaaagagcattcaaatatccagtatcagctatataatccccctctgtatgtctcctggtcttcatttcaagctcattatccaacaacagcaccaaaactccatatatctgacttcaattgtttgagttataccaatttctaaaatcaccaccaaagatgctcaagaaaatccggcactcgctgagatgctttccaagacaccggtgtgactgtgacgatgacagtcaatgctcgggagaccaatctaatcacccacgggcaagggtaccaaagcgcgccctgcgtcaaccacttcctaagaatgctgcgaaaagcgcggctccagctaaccagcctggtgaagatggcagcgaagatgaggatagcagcggtgattatgatccccaagctcccccgcccagcaacgttcctctgtccaccaagggttcgcacacaggcgtaacacctgcgatgagtgagacaaatcttgatgagtcttcgtctagcgatgacccatattccccctcaaccagaaacccctacacaaacagcccgggggtaagtgatactggttcccacaaaccttcatctggcgacgacttttattccgtcggaacaaagaattcacacacaggcattagtctcgagatgagtgatcccaaccccagtgagtcccaatatgaatcattttcagattctgaagaaagctcttctcccctgagagcgtctggtataagtgaatacaataccgatggagatgactataatggagctgacgatgaaagcctcgacctagatctggatgaagtaatgtacgatgcggaatactccagcggatggtcgagcacttctagcgacaggagacgccggcgttctctagatagtcaagcgcaaaccgatgctgaacacaggggtctttatggatccagaggcagtagcggcagcagcaaacgccagcgtcttgacgactcatccgacactgcaagcggtagagtgagaaccggcatcgaactgacagtggaggacgtcaccaggtacagaaataaaggagcccaataccaagcatggattgacgacccggaagagccagggtgccaaatccaaccggcaacattaaatatagaggagatgattgataaaaaacaacaggtgccttggaaagtccatgaatcttatttcatagccgagcctatggcactacaaggcggcgatgttgagtcgatgaatattgatcgaggcggtccgcgataccgctacacacacctccgacaggatccggggccaaacacactcgaagctaacgaatttgagcatcgggttactcggggtattattattgccgagagactctatagggaagacggtcctcattggaatgaggtcgctcgagcccaatacttgcttgattttaatttgaatactctgaggtatgttgtctttactgatatcgggaacgaagaaacaggtccatatatacgacacgaactataccctagattgggtgttagatggtcacaggcaagagacgttgagtgtatgaagtttgagcatggtagtgctgagtatcaagaactcctcgggacaaagttgggtaaagctatggcttgtcttatcctttcttcattccctaggggtacgatgaagatcactcgtattgccacttggtgtaattcgactgcgccgcagatgcggttcgagattgaacctgttattgctgcatgagatatatgcatatatttgtgctgatatttgattatttagattgttgttagagtcagaaattgagattttactaaggcccctgctgtaatagacaagataggcattagttgggtcattcatacaattgggatgacttccaagctgaacaataacctgaatttgatcttgaataccgtcctgtaccatacataagctaactcattgctttgaaaagaaaaaaagaaaaagaaaaagatatacaattaataatagtcatgccttgcacagaagttcgagtccgatattttaggaactcgtgagagatgctcaagcgaagaacttatacaagaatgaagacaatcactgtcacaaatagcaaaaaagaaaaaaagaaaaattgaatacatgagaattggaaacaatataccagcaccagtatcatacggcatccgcaatgataacctcggcagccttctcactgatcatatagatgggtagggcgatatagtaacctggaatcttaggaaagaccgaagcatccacaacacgcaagccgtcaaccccacgaacacggaagtccgcatccaacacagcctgaggatctccatcttctccaattgcagcagtacagcaggcatggtgaccccatgcctcttttttaatgaagtctttcagttcattctcagtagtgacattgggtcccggccagacctcttcaaacccgccatcaaggggaataaggtcatcgaatattgtgcgggagaactgcattgcttcatatacagcctgcaggtccttgtcatctgcaccatctgtggtcactccggtatcgaacgagtggaagttgataaggggcatgtcacgcgggtcggtagagcgcaactcaactgtaccagcgttattgcgagagcgcgactttaacgtaatccaggtccagtgctgggcatctttgagaccctcgtaggagtagttgggataatagccggggaagttgacgggtgctcctgagatcagtaggtcgggctcatcttctgcaacagacgacttgcgaatgatggcgatggcgattccattggtggtatatgtacctttgaacaaaggattgttttcatactgttccaaacaggggtcgggaagagaatacaaaaaggtacacttcgatgtgaggacgaaatcggtgggtgacttgcccactgtacctatttcgtaccgatcctgaagattacgaccgacgccggggagattcaccagggttgagattccaaatttggacaactcctcctttgggccaataccactcagcttcagcagctggggggtgttgaatgagcctgcagacaggatcacttcacgagaagcactcacgctacccggtgttccattagacgatgtctgggaagcccgggggtctgcacggtagaggctctgtcctcgaagatagtcaacaccggtagcccgtggcttcgctccggtggtatcgaaccggagcttggttaccaaggtgttcaactggatatcaaggtgatactttcgcgaaccatccgagtttacagcattgactgtcttcatgaggaattctcgaggacctgtccgcttatattcggggacatctacggcgagagggacttggtatggaccctcctcgtagtcacgcgaaggaagggggttgttaagatcacgcagcagaactcgggcgaggcccgtgaccgtagtgatcagtttgcccagcagtgtttgacccgcggcggtcgcaccggccaggatcaaggacagaagcttttggtcttcaatgacaagacgcaggtctgtgaggctcgttgtaagccatccgtcgaatccgtggcctatgatgctgctgggaaggtatcggttgcgctctagtctctcgaagtattgtcgcatattcgaggcagaccatgaatcattgccagtgagactggccagttgctcccagtcattctcgtacgggtagatcgtgctataaagatactggtcagtatatgatagatacatccgatagacatgcggagaagatatggctcacatcatggcattatgagcagaacatccacctaaagtaccggctcgagggtataaaattcccaaaggttcagacccattgggcgcattgcttccaacatggaggtcaccagcaggtgtccggtaagtcattttgctgtcttcttcctgacgagtcaagttcgagtagtgattcacgaaataatcccatctcatcggctcgtattcggtggactggagctgcagagcggggacaatttgctgagtcgcatttccctggtcatctcctgcttctagaagaagaaccttgtagcctgcaatggccaatcgtgccgctacagggccacctccggcgccagagccaacaacaacataatcatattctgtggtggagttatccgaagacctcctgtgtgcatcatgatatcgatgatccggtctatgatcactatattatgttagttttccgtgtcaacaaggtctgggtagagaccgaaggtgcacctacatagctgagacaattgaaagagtggaaaatagcccaactaccacaggaaaacgcatagtgaaagaaaagggcgaagatttaccccaaaaatagcaaaagaagagaaataaaaatggggtcttcagccagaaagaaaagaaagaaacgaggaacttgggttatatcaatggtcacaaagctcctctcctgactctattacaagggcatagaagcaaaagcaccgcggacgcccatagtactatattcggccagctactgggtatattccttcattgtccttgcaaaggcgatcgacataagcttccaccttccaaattagcctgtatcaggcatggatactcaccgcaatacacactaatcctatgatccttgtacgtagggatggctctgactcgtaccaactagctccgaacgcagccgggtcttggcgagacattgatactttggcttgtgggaccggccagccaatcaacttattctagatcctgcgcactcgtgctagcctcttagtgtcttctctgtgccgtttgacatgccgatcatacagctctctgaaaagccaccaatctaacggtgaagctagtcttctttgggttccaggttctttgttcgttataatgatacagttactgttttaggagcgtatggaatacatctcagacatccgaaacctaaagccccctattgttgtgtatgactggggatgtagcgattcttcctatctttctgtctgattttatgtaaggtacacttggaggaaaagaaaatatgatatgatcttatgaataatttgagctttatcatacgtttattgagtatgctgaataaaaatctaaaatattatattaaagagggatatggtcgttttggtaggatccaacaaccaaataaccgcgaataagtaaacacagagaaagaaacgaaagaaatagaagccattgccctacataagaagataccctatcttcaccctcaactacactggttgtggatggtgtagtcgggcttcatcagaaaggtccaagtcatcaaactggtagaatgggccatcactactcttgttctggacagggccagaagtcccacgagaacgcgagttcatagcgtatgatgatgatttggcttgctcggtatctccaaaaaatcggggagatatacgacgtagtagagatcgaatagcgggcagacacgcacatataacgccaacgtcacattcaatagtactccaataccctatagccacgtaatccccttcgaaatgtcaatgaagctgcaaatatagaaagagaaaagagagggaatgaacactcacatgtaaggttagtggtagaggcaaagtgaatgagtgaattcagccgcaggatgctgacaagggtgacactaagctcatgagttagtcattgaaattttggaacaggctgaatagggaaacgcacaatatgcccaggctgaacatgcaaattacgaatgatttccgtttcatggaaaggttcaaaccgtatagctgtcgtagagggagtgccatgacaattatatcgagaaccatgttaagcactgccgatgaccagccctgtgcgttgatgtggttgcatttgtagttctcctctccataccagcgatgccacgctccgggtagaggccgacactggaataccgatatcaagacaaaggcgatccaataggagacgtttagtgcaatcaccacgtacgttgctgtccgaaacctccgatcggggaaaatacgaagatagaaaaaacagattgatattttggtcagcgggagaatgctcagatacaacaattcatcccaaaagtagacctggcgcaattagacaacgtaccttgggaagagcaggaaacaagaactttagggtactcacgtaaagaatatgagtgatattgtcgaaaggaagggtccacatatccttccctaaacctgtatcggccactatacaaatggttagtggagtgaaggggctttgactagctgccaaggaaaccatacagacgaccgagagtgctgaaagtggtatgagaaaggcctgtcaatttcagtgagaagagaattcggtttcgagcaaagggaaaggtggtatataccattgtcaacaccattgtccaatcatccgctccaaaaatgccaccacagcatctaaatcgagccactatccggagaataaaagcgcaaagggctataattccgcctgcaacccctgcataagatacagtctttgtgtgatcccgaattgggtccccgcatgctgatgtcgtgacattttttgtagcttgtgtatattagcaggggatggaataactagtcataaaaccattgactcacttagagattctcgaattgtacaattggcaagaacacactcctgcagaacggccgtgtagtgtacatcattgcacaggcatgtctggtcggttgtcttgcaggaagattgcgacaccgaagtcatcatacagtccagctaagaagggtcagtgatatcgagttcgcgctaaataacggcagaagaattgcacgacctaccgcacatgagggtaaaacggccgccaactgttccattcctgctatcacagtcgttgcgaacagggcggccacaaggactgctgttttgaaaaaacgcatcgtgaagcttacaggataggattcattcgttttgcgattaagagactgtcaaaggagacctgcgctgaatttgatcagtcgagtcaggagaatctacggagtaatattatgagattcacgacgatctcttagctgggatacaagaatttgttctaccttcctgtcaggatcgctagcgcatgaaaatctcaagtttaaatgccgcatcagtcctcactggggatttgcctttctacatgtttagatgtttaggtaccacatctgtcattgacgttatttggggactgtttcaagcccctgccagttatcacattgtcacctagcaacaatccacaacttcaggagttcctgaaccacatcacaaaagtacaagtaattctatacagacggagtacgaagtacaaccggcaacttcggacccttagggccagtcaagaagttgactaagctggtctctcataactaattgactaaatggttatggatgatggctgatttaaattaagatcggcacatatacgagccttccccagctcttgggccaactctagacgtttggaggggcccactaatgccggaattgatggtccgtccagagaccgccgatctaaattgggactttgacactccccactcactcggagtaggttatccatttctatgccgtatacctagttgagcctagtgttctccagagagatccacaggctccggaataatggctaaattttgctcagactcccgtggagatgatccgaagaatctccgtagtgggtctatactatcgggagaaagagcgcttcgatatttacgatctacacgcatcaatgatccttagacatatcttacaaccccaatgccgcgatcagcactatcgttgaacaaagatgtttcaccctggaggcgtctgctaagatttaaattcaccgcgaggcgtgcgccaagatccatatatccaccacaggagcgttcgaatattcccaaattaggcccgatcgacaataacacacgaatagtacggagtatatgtatccataatccaccctgtgtagtcgaagggatggtcatggaaaaatcaggggcttgtgtcgtacttttcgtggctttttactccgtgcaggggtgctgaaagggatctaccagaacagaatccttcaatagagaaagagccggaggattgaaactgattgccggttaatttacgatatacacaatatattatttgcaataccactaccatacgcctggacagttgtctctatgttgtactccttcgggccataattgcatatattctatagtggactcatacgctaagacgggccattcaggggatcatcatttctcagcatgtgcgatcttcgaatatttacctaggcatagaattgacgcgggatatctaaggaatgcattattccactcctctggacagtcttcttcagtcactcgttgcacgatcattcctttgaacctaaggggaaactggcatttctagtggaggactaacacattagttcatcatgcgcattctcactgcagggttttttctttgccaattgtcactttctacactagtatcggctttctcggggtcaatgagcaaccacaatggtcattcgagacatcaaggcatgcacaagtcttgcccatatgccaatgccaaggaccaggctgaaccgaagacggaacatgagaagcggtttctcttcagtttgatgaaatcgcctatcgatagtatgccaccaaagccctctcgcttgtcacaatttgtaacaaaacaatagttaccggagaacatgcgttccaacccccagacttcgagaatggtgaccagcgaggcccctgtccaggtctcaatgcactagcaaatcatggatatatcccaaggagtggagtggtgtcggtaggttattcctatatgactatcatcaactcctagctaaatccagaaaaagttcataaatgtgatcgcagcaatcaacaaaggtatgattgcatcatgaaattctcaacacagcatattctaacctttcttcatcagtgtatggcatgggtgtcgacttggccaccgtccttgcgatcatgggcaccgtctggactggagacgtgctgtccctcgatcccagcttctccatcgggggtcccgatactggcgttaacaaccttctcaacaacttgggtggcatcctgggttagagcaccttacttgcttgctcatatctatcaccgctgacatcacctgcagggaagccgcaaggcctcattggctcgcacaattttatcgaagcagactcctccaacacgcgtgatgatctctacgttacaggcaacagctggacactgaacatggacaagttcatgacttggtataatatgtcttccgacggcacttataatatggatctcatggctgaacgcgcaaagatccgtatggatcagactatccatacaaacccggatttctactacggacccgtgactgggctcattgcgcgcaacgccggttacatctttgcaggtcgactgttccgaaatcactcgagtgaaaacccagagggaacactgagtaagctgatataagaggactgattatgcgagatctactaactccatcctagctaagagccaccttcgaaatttctacggcatctatggcccggaacacaatttaacctaccgcgaaggatgggaaagaattccggaaaattggtacaagactcctatagactatggactagtctcactcaacgtggatgtcataggcttcatattgaaatatccggagcttggaaggtaagacactctgccaggttcctcatattgataatcttctaacaataatttgaatacagcattggcggaaatctgggtgaagtagacagctttgccggagttgatctcggggatttgacaggtggtgtattgaacctggctagcctgctgaagggtaacaacttactgtgcttcgtggctgaggtgctgaagttcgccagccccaacgctcttagtggcatatactccaccgtagccaagccgttggagtttgtcactaatatcctcgctgtgcctttgctcaaccttacttgtccagcattccaagatcttcagctgggagggaagccgctatgggaggcgctccaagatgactttcccggtgctttaaagagcaaccgttcgctttaggtattgcgggcttgctttggattggatgtattataagtttttattccagtttaatactttattaataaaattctaattgttcctgtgaaaacctgaaaatgggtatatatagttacggggtgctgttctaagacagggatcaacacatgcattaaggggaatatacggggattgagaattcggaaacatgcaaggttatgcaggtcaccatcaaatgccaacctgcatattatatagttctgtttgcattttgctgcatatagttcgggcttacagctgatcgaatgttagaatgggaccgctaatttagtgtgaaggaaaatatattaatccgtgttaatccgcgtttcgaccatctatctgctcagaggggtcttagcgaatgtcgagatctctctttatactaggatgtcttcatagcttataatagacgttcataaagaccccatgatcattatttacagtattatctttaccactaaatcctatcttcttctgtactagggtattataacccctaaaagaatcccgacattcgctgatgtctgacattcgccgagctctcggaattcggattaatacatgttcctctgggccaagaggcgctaaaaattagcggtcccattctaacattcgaccagctgtcggtcgcaagggactgatatctgacattcgccgagctctcggaattcggattaatacatgttcctctgggccaagaggcgctaaaaattagcggtcccattctaacattcgaccagctgtcggtcgtatagttctgtagcgctcttgttttgcgttgtctgaattagtaaaacggcgcaatgcgtgatgataacagaattgtcagcttatcagcaatgcggctcagtggtttagtgggataattcatctttcgggagaaatctctggtttcaaaattacctaatatagatgaggtcccgggttcgattcccggctgagcccctttttttattttattttagaattccataccccttgaaccatacatttctgagggttaaagttattgatacccatgcatattcaaggagagcccaccaaccttagaagaccatgcataccacttacataacgtgtattttaaggttctggggtcgcgtagggcggaagccaattcgatatcccaactgcactggcctcggcatctctttccctgtaacagcattgcaaggaattttggcttcttcgattgagttcccttgagattctggaaactctctctgatcagacccctcagaatcaaacaaagaactctcatctgctaggcccgattaaactgaactagcgcatcgtgtgctagatctagttaggcggtccggccaacgacagaccaacgacaaaccgagctcatgcaactaagcgatagtttagagccatcgtacgtgtccctggacgaaagtgaaagtcccgactgagcggtgagaatcatctactcatgaatggtcggggatgatgaatgacagggattgtttagtgtcggggcagtgtacaaaatacggactaatatgcggagcttgttgcgccctgcgcttcgcttgcgatattggggctgtctctcttcatctgtccgcatgggattctgcctatagatatgagtttaattaacttgagtttgaccatgccagattagttcctcgaaagtacgggggccagagtgtaacccaagacattcctggaccttaaatgggatatcagtaatgcccattctttcaattggaagtttaagattagacatatatatatgatgcatttccctgatgtttggatctgccctatgcatactattcagtcaacttgttgatttctcttcatcatgcgctcgctgtgggcattatcggcactggctttctcagttaaagccatacaaacaacaggatgtcctattttgggaccggcattccctgcccctaccgctctttcagaggatcctactttccttagcaaagctgaggaattgacctcaaagctcaatgatgccattaaaaatggaagtctgcccgccatatccttcgcagtgcaggtctttagcagcgaagaggacgacgcaccattcgatttctaccacacagatgatccagttaaagttggatctgtgggcgttcaagaggtcgacgaggataccatgttccgcattggcagcatatcaaagctgtggactatgtttctcttcatgaccctggaaggaacacagtacttccacgagcccgtttcgaaatacgttcctgagctgcgaacaaactacagtgcagcacaggccaaagatacaattaattatttgcaatggagcgatgtgacgatcggcgagctggctagtcaccaagcgggccttgcaagagactgtatgatcataacccggcgacgcgagtgtgcactgtgaaaaagaaactcacctttgattttagatgcatttggagacctcgaatttgagtcagagcttctgcagggcatggggttccctgcgctcctaaaaaatgatcaactgacttgtgggagcacgtctacgtgtgataggaagggtaagtcaattgtgtgcactcataatatggtcgaattgtttggctgacagcgggaatgttttcaagaattcttccgtggcattctacaaacgcgtgagtaggcatgatgccgctgaacttggacatacccctaacatggtctattagatcccttgactgcaacatcacagaccccgatatactcaaacgcaggatatcaaattctaggctacgtgttggagtcaatcgcaaaagccgactttgaagatatattactggaccgtcttatcaagccactcaacttgactcggtcttgtcttcaaatcccagaccccagcttggcagtgattccctacaatgagactttcagttggtttgggtatcagattggtgaagaagctccgtgagtgctaatcagccatttgaagtatacatagcttacacattgctagtgccggaggcatgttctcttctgcaaaggatatggctacatttggccgtgccattctttccaacacccttgttgaccctgccgtgacaagaaggtggctgaggccgatggctcacacatcatccctgcaactgtccgtgggcgccccctgggaaatctatacatttttgacacctcgtcgggtcgacctgtataccaaggctggggacatcggactgtactccagttcgatcggtctttcaccggatcacaatgccggtttcacggttctagtagccggagctaactctcacgcgatgacagcacaaatcggagaaatggttgccgatattatgcttcccgcgcttgatgaagtcgctagaaaccaagcctttgaacgctttggcggtacatatgccttgacgagcgactccttcaattcctcaatcaccgtcatggctgatgacgggccgggtctggtggtctcagcatggattagcaactcggtggacatgatcgaatctttgatgaccttgcaaggggtaactgatcgctctgcgataggcattcgtctacagcctagtggtcttgagaccccagggcggatctccttcctggctgttatttatgcacttcctatctcggaagatgctgggccttttattggctcttgcttttcgtggattttgctcgagtcaatggtgtatggcaacgtgggccttccagagtttgaattcactctggatcatgatggagatgcgacgagcttatccccccgggcgttgcgcgttactctccctagagtttaatagatgagagtttatcacaatgtatctaagttggcggttgtttaatttcttattgtatagagttactctacgtaacagctttgaaatgtcgattggtcatgtccggacttttaaacaccgtcagtccaatctgggaacattgttatgaataccatcattatttatttttcagtctcgcaagagccataatttttgtctccctttgtcgagagcgcaatgcgtctgacgctaaccagggggctctcctcgaccgctcaggccacatcttctttctcctcacccccttctcccgacgaactacctctccctttccacatgaaaagcacactatattggtcttaatcatctgtatggtgctcgtttcgtacggagtccttcacagaggcttcacttgaaatatatccagcctcgtttccagccgcttcggcactttcttcgatgcgaccatatgatgatcaagaacggtcgcaatctgtgatgaaagtcgggttccttcagtggccctacctcatatcgcaagtaaggtcgacggtcggtcatgcgaagatgttacacccattacatttcgacaagcgcccgatcgcccagataatcacaagctattgatcattggaattttgccgaagtatatcttttggacgatgatgttatcataaaatccttcgcagccagagtgaagaagatatgcaacctataatccgcgaagctataagttatgacattctcggaacccatccacggattgcggtatggctatcacgatcggaatatatcgacatcagtactatctacatggcgacgttgcaaaatattgccaggagagctcgatcacttccgagcttcgatctaaatggttccagcaaatcttggaagcagttgttgttattcacagccatagtgtgttattcattcggatcttgccctacggcagtttttcattgatgataattcggatctacgactcggtgatttcaactcttcacaatgccctggtcatatatcaccacactgcttgccacaagactatgaacttcctaatactgaaacgtccgatatctttgccctagaatctaccctctacgagcaagttgctggtaaggccccatatagcgaactctctcggcctaaatccgatgatctggatattatcaaaagctcaaatctgaagacaacatatggtagatcgtgaaattgaatatagttcaaaaaccgcaattttcctgatgtgtctgatctattcggaggagaaatcatactaggttgttagagaggcgaaattcccactgctcaagtggcatttgatttgtacttgaaagatttcgtttaattcatatctgaatacaaaggtaggggagcgcgaatgtccattcaaaccactccattcaatcaaacccaacaaacccatcaaaccaattaaaccaatcaaatcatcaaacccaaacaaagcaaataactaaagcaaacaaacaagttgtacactccacgacccacttgtctcagaaactccaacttctgacgatacatggggtcactccaggtagatatcactagcctctgatttgaatattgagattcagaatagaaaaagttgatatttcatttggacgactttgattcagacagaagaaagaagaaaatgaccaagaaaatcacgacgttaagagattcagcttccatgacttgtaggacccatctagatgaacatgggatgatagtagcctagttccttcagcgttatagtaggcaacagtgacgatcttttcctatcatcgaactcgggcttgataatgaattcgtgactgttgtcgtcgtgagaagatgtgaaatatcccatgatgatcttgtctataagatctggtcagagcggaacttttgcgagaataatccgatctgatttaccaaatgacatgtccgtttcctttaatcgtgcattatccacgcaaccatctgtgcagcctcttgccacgtcgctcattgtagacgtgcttattcaaccccacacttttggggacggggtcagactggtagggccaatgttgaataatatgagcgtatgatgtatctgtggcatctggttggaggcctaagtggagggccgacagaattccggaatcttcagttgagactgtgtcataaggaacatagcactgactttacaattagtaatgtgctttgttctatgctttgttctattgtcgatattactggcggactgttaaatcccacacagagaagctcttcaattattttggacgctgaatgaaccaagctcgcttaagttggtacccaaaagtcccaaatctcgcgatcgtgccactcactaacggcacgagaggatagaggtggccattgcaaaaagaagccccaagtatttcttgggacttggatgatatttgtgggagttgagaaggttgaagaaagaagaaaagtgaggagatacagagatgaggtaaggtcgctccttcctcaaaactgttgaggaagtcactagtcacccggacatccataacgatataaaggaaggaaacaacaacatatgtacagaacatcaacagcacaaaatttagagtttaatcataatacttagcaaccacacccccaatgataggctgatctccgatttcactccgagccacacctttgtcaacccccttggccactctcgccttcacccactcgccagcagtgataccaaccgcactattatcggttgtctggtcatatcccagacgatgcagcacgtcactcacaaccggtcgcagctcgaggctatcctccggtcgaacaaagtacaaaacacctagacgatctacatccctctgatcgggcggcggtgcaacaacacggtgtatgctgctcttgaggaagccgttggtgaggaagtggagagagtccgcaagattcaccgtgatgctcccggggtacggcttcacccacttccactcgccctctggggtgcgaacctgcagcgcagcaacgggttggcggaacaacagagtcaagctgccgaagtcggtatggcccttggaccaaatcccggcggccttctcgttttcttcgtctggacgccggtggtacttcatgtaccttaggtggcagtcgcttttttcaccatagcgatgcacttttaggaaatagtcctcgggtagctcgaggataatggcgaagagcacgagaagtttggccgcgatttggtcatgaatgtggcgtgcgaagccttcgataataggacgattgttgttcacaatgtccggttggggaagctcgagggctgggatgaattttgggatgttgtagatttctgtcttgtcatagacacccggactaatttcctaacctagggttagatatgattgtttctcgccgtagattatcggcattcgacttacccggagacccattggcttgtagccattgtagccacctttctcaagctccgcacgatacttgagtttctcctctattgagagattgaatatctccttgccaatagcaaattggcggtcaacatcttcctgcgagagcccgaagttggtaatataaaagaagcctaatgccagataagtatacaatcatgggaagctggtgttggaaacatatactactgacctatattctggatagcctcaaaaagttgcttggctaactgctctttaccgccgggttggtcgaacacagacagatccaaggtagcgagatccgcccagtccactatatgcaagttacacgttagcatggtgtctcaaatctcggctaggaccctaggttttgcattaaaccacttacgatcaaaagtagtctccgggacctgactgtatgttgggatatcagaccccgtaggaacaggggctggaggttgggtcaaagttgccatggttcatgcaagatagtggaagaaaatatataaaaagaatatatcacagcaagctggagtagaaggatttggttatggagacaatagcgtgcatttgcactatatctgacagatggggggtttatcaagatcgcgatatccttggttttgtagcggatttgtagttgacccttgagcttattgttgaatccattccaatcgggcaatttgtaggtttattccattgacagcccgcaaggttgatatgcaaggccggccagattggtgcgagtgcaggtggacctctttacgccacgtgggctttagatctcatcatgatatcctccgtttgcgtgatcagcgactgttccctcactaaatcgcgacttacgcacttctacaatatttccaatgataactccaaataagggaatgaatgactttgaccgggaacgtacttatgaggatattaactacacgattttactaaattcgatatataattattgacgaaagtaaagagattgattccaaaaatattcgaatagactatctccatctggatttgaatccaattgagactatattgtatgtcaggacttgacagcagcaagtatggcctaggccatagcatttgcaatacttttcgactatgatacaattttttatctgctaggtttggagcttggtctaagcttctataatgtttttcggagggtttccggactgataaaggagatgcatggcgatctatcaatgacaactcgcgtttaaccgggactgtcaacagtaataatttgagaattatactgtcgaaagcaacatcgctacaatggcagacaaagaagacgggcgcatttcatccaaagatttgggcaggaccacggccaccgatattatctccaccagtgataccgataccaatcatgcgcttcattttgcgagacgtggtgaagctcttgaagaagcctcatcaagcctggaaaccatcaatggctacgatccggagcttatgaatggtaggacactgctcacggcagcagaggaaaagaagctactacgcaagatcgactggcggttaatgacgctttgttcactcatttttatgtttaagaatctggacagcaacaatgtgcgtatacacaaggatactaggtgggacattataactgacagcctcgcaggcatccaatgctcgaatcatgaacaagggaacggatcagaatatcatgacacagctcggaatcacatctaacgagtacaatcttgtgactgtgctttactatgtaagatatccagcgagtcttgatccagatgccgtggcgtatcgctaatcatatgtgacaggtcccatacattttgttagaagcaccctcaaatttactgctcaagagatgctccccttcaaaatggcaatcaaggattatgatcagctggggtatcgctctcatgtgcaatgctgctgtgaagaataagggcggtttatatacgacacggttcctactgggtgtagtacgttaccgcgccaatatgtctcatgattccaaaatggaatagactaacaccgcaataggccgaggctggacagttccccggcgtcattctccagatgacttactggtatcgcccggacgagatgtccttacgactgctctacttctgtaagctacacacgatccgctcgcaaaacatctcgtactacatgaaatttttaactgacgatataaagatatctgcggaaatatctcgggtatcttcggtggtcttcttgcctatgggtttgacaacgcatctggtgcaggcggcctttccgggtggcaatggtagcgttctcttatatccattcctgaatccgtactaaaattactctaggttgttcctctcagaaggcattgcgaccgttctttttggatttgtgatttggttcctactcccagactgtaagggtcatcctttgctcataacacgacgccagtgactgatatgcgaaaacgcgagatagttcccgagacagccaaatggttgactgagaaggagaagaagtttatccaggctcgactcccatctaattcgccccgtggaaatgagcagcacttcaagctgcgtgaagttatcgagtcactgaaagatcggaggctgtggctgtttacggccatttgggctacctttactgttggaaccaacggtgtcacattctatcaatcgacggttattgccaacctcggatacacgtaagttggttactttccgcatacagttatgacttcaacgggcattgctaacagtctcttaggagcattgcccaagcccagcttctcaatatccccatcacgatctgtggtctcctagtcattgcggctacaggaattacagcagaccgtagccggataccccggccattatacccacttaccttccttgttatcatcatagtctgctacggggtctttgttgcctatccgagtaatgctgctatatacgcggtaacgttgatcggaaatgccgtgactgcatcatggtacccagtcatgtggtaagtttcctatgtcctcatccacttcatatgtttgtatagctcacaacgtgataataggccatggcgcgtacaaaccacctctcgagctacgggatccgccttctctatcggatttgtcaacagctacggtcaaattggcggcgccattggtccgcagttgtttcaaagcaagtttggacctcactacacagtgccattctccgtcgctatcggtcttgtgggtacttgcgcgatcttgacggtggtaacgtggtgggtgacacaggagacggagcgtgacacgaggcggctgaagctagctaaaatcgcagcggaaaaaaggggcgagacgattttggaagatgttgtggacaatgacttgaagaacaattgagggaagagctgttgacaagcctagatatattgcggaaacctatatacaagctgtagattatagaccaaagcccaactccatcgttaacaaaaattcagtgaataatatccgtgacgtgatgatcttcagaaaaaatgatgttcttttactttgtatgatgttaattaccccgatatccaattactccaagttccaaaaaaggtccgagaatcgaatcaaaatcgcgcgatctccccgcggctaataaaaaccctccgactccatacatacccctcacaatttgtgggaacctcttcatgtggtcttctacatgattattccttattcgcagacaggtttctgacacagcatccttggtattcggctcatctagcttggacaatgaactcagttgacacccaatcgcccgcaagggctacgagtgacccctactttgacctgggaacattgagccgcaaagtcagcaccaattcccaggaagcccagatatggttcaacagggcccttgtctggacatattgctttaatcatgatgaagcaatcacctgttacaagcaggcaatcgcgcacgacgaaaattgcgccatggcctactggggggtatccttctgctcggggtccaattacaacaaaacatgggcgctgttcgaccaaagagatcgactcaatgcaatcaaacagtgttatatatattctcaagaagcactgaggcgggcaaacaatgcatcagattgggagcaggcgctcatcaaggctcttgcagaacggtaccccaacgacgatccaagtagggatcttgcaggatgtagccgagcgtatgccgatgccatgagagaggtatatataagtttcggtcgcgaagactttgacattatcacactattcgcggacgcattgatgaattgcgcaccgcggaagttatacgacgcctccacggggctgccgatagcgtcttctccggtattcgaagtgaaagatctacttgatcgggcgttgaagatgccgaaagttgaactttatcccggtcccgcgcacatgtatatccacctgatggaaatgtcggcgactcctgaggctgctctgccggcagcagagatgatccgtgaaatatttcccgatacaggccataccttccatatgcccgcgcatattgatgttctcgtgggcgattatcgccgtgctgtggaatacaatctgaaagcgaccgtcgcagatgacaaattctttgaacagaatggcggcttgacattctacagctattatcgcttacacgactatcactccctcatctacgctgcgatgcttggtgggaaatcaaaggcggcattgtcagcgacggagcgaatggaggcgactatcacagaagaaattctgcgcgtcgagacgcctgcgcttgcaaactggatggaatttttcaaggccgtcagagtccatgtgctcatccgctttgggatgtgggaagaactcaagaagctcgacccgctcgaagataagaatctctattgtgtgacgaatgtgatgagacactatggaaaggccatcgcgtatgcggccacgtcgcagctcgaggaagccgaccaagagcgagagcttttcaaagccgcttcgaagcttgttccccccacacgcctcgacttccccaacaaaatcaccgacattctcaaaatcgcagctgctatgctggatggcgagatcgagtatagaagaggcgattatgatgaagcattccgcagattacgggaggcaatcactctggaagacgagctgcctttcgcagagccatgggggtggatgcttccagctcggcatccatatgcagccctgtcattggaacagggcagagttgagcaggctgcacaggcttatgctgaagatttggggcttttcccgacacccaaacgcacccaccaacacccgaataatgtttgggctttgcatggatatcatgagtgccttcagcttttggatcgccatgcggaggccaatattatcaagaaacaactttcccttgctcttgtggaggcagatgttgaaattacatcttcatgcttttgccggcttgggaaattgccctcaccttgtggaaagcttaaaatgaatggttgccacagtgtggggtcgacgtgtaataagagctagatgaacattttgcataaattaacattgttccgctggcttctcgtttatgatacatatagaaagatgtaaaatgtaaaatctacgcgcccaccaaagtaggcaacaaatttatcatgccaggtctttcgggaacaccttaaaagaatacgctataaacacgggtatcacaccacggcatctgcaacttgcttgatcatcccgcgaacctcatcaacgatacggaaacaaggcaccaacttccgcgctatcggatcatgtggacagagatcgagcgggtcgtgatcaacagcatcctcctttctccgacaacggccttcagaattggggcaattttcgtgcccgaccatatggcgattgcgttgccgctgcgcaaactgttcaccgaacaccaaaagccggtctgtatctgtctggaggccgtgcacgacaaggtcccggagcttctcgccgctgatttgtagattcaactctgacggtattccaagcccacagtcaagatagacggtcctagtctcgttgctgatatctagctcagtgcagtgcttatgcagccagcggatgtacctttggtagccggatgttatttcaaacatgagctggccgatgaggagcacattttgaaccgttactcgaggcggtttggacacatcgtagcacataggacaggtcagtagtctctctgtgagggacacgcctgcgcggagcatcggaacgatatcgtgtgacatattcgcgcggctcaagctccggattatatcggaaacctcttcgtcgcatttacaagactgagagaacgacatgggagagacgtatgcatccaaggctcttgagggtacctccgggttatgcaatccgctctggcgtgatgtgtgcaatagctcaatgggaaaggaacacatatcgccgttcccgagcatctcccagtgcgaggaatcgaatccgcagctaccggatagctcgtatggtaatgagtcgaactcaccggctcccattaacatattgccggcttcatgagagtcaaagggcgattgagaaatgacaggcgagaaatgcgaggagcttgaagatcctattcgctcctcttcgttcggtaaatcgcggtctggttcctcttgtcgtgcgcgctttctcggccttccaggggctcctttgtctttgaatttacatgtcaatgttaagccccggcaacgagagcaaccactcttttcgcctgagcatctgagcttccgtgcccctatttaacattagccagacattcaaggagtggagaacggctcagctcacggcatgcttcgcaggaatttcgttgtcgagtgggatacatactatgttgaatgtattagtttgatctaacaagcacaggaccgaggtcggaagttgacgtccaggtggaattggaggattggtcatcctgcgctgagatggcgtcaaccgagcttcgagcggggtagtgcagcctctgagcagcagattctatgcatcatgccgagtcagtgattgggatgaaaggtgtcaatagaagacatcaaaagctcaagtattgcgtgtgcttctgaatatcaatgttcggagctgtggtttgcgggtttgtcgaaaatcctccgagaaaaaactgccgagcttctgtgtagcgtcgcttcgctgtaatttccatttatttcctttcaattcaatcggtaaattttcattctggttgaacagcaaaatggccaaatccataaccgcacgcgaattgcgtcagcattgggtaaatcaccatgaagttgccctcctcgacgtccgcgaagaaggcccctattccgagtcccatcctctattcgcactaagtgtgccagtttcggagatcgagaagaagttgcctccactggttcctagattgtcagccccgattgtggtctacgacgacggtgaaggttatgcagctcgggctactgtccggatattagcgctgggatatcgagatgttgccatcctgcaaggcgggctttccggctacgccctcgttggtgaggtctatcgcgatgtcaatgttccatccaaggcttttggcgagcttgtcgaatcgatcaaccacactccatccttatctgcgcgggatatcaaggatgttctggagagtgagactgatgtggttgtcttggatgcccggcgttttgaggagtataaaacaatgagcattccccggggccgcagctgtccagggggagaacttctatatcgctttttcgaagctgtaccctctccggaaaccacagtggtcgtcaattgtgcaggtcgaacgcggagtattgttgggacccaatctttggtgaattctggaattccgaataaagtggtagcgctccggaatgggacgatcgggtggacattggagggtttggaactagagactaaacagacggaacgggtcccaggtccttcagttgaggcattacaaaaagcgcgggaatacgctgaatcgtgggcgaatcacgtcggcgtctctattattaatggcgatcagctcactcgatttagtacggagtcggaaaatcgaagtctgtatctgctagatgtgagagacccggaagagtatgcccttggacacccgaccggcttctccaatgctccgggtggtcaattggtacaagccaccgacgaatgggtaggtgttaggggagctcgcattgttctgtacgatacggatggtgtacgagggcgcatgacagccagctggctcttgcaactcggatgggaggtgtatgtctttgaagagcgattggcggtgcctgataggcttgtgttgcctgaagtctcttcgtggaatcctccaaaggatggcgctatcacggtgaacgaccttcagaacctcgagggagcgactgtggtcgatctcgcccgcagtccgtcttatcgcaaaggccacattccgggcgcatggttcgcttctggaccggaacttgcgcgagatctgagggctatcgacggtgacggccctatcgtgctgacctcgcccgatggtgacgttgccgccacgaacgttgacgacgcacgcaactcagtctcacgacaagttctgtatctgacgggagggacaacggcctgggtggctgctggtcaccccctcgagaccgaattgcgatgtttgtcgcagccaatcgacgtgtataaaagaccgtatgaagggacaagtaacgctcgcaaggatatgcaaggatatctcgactgggagtatgggcttgtcgcgcaactggccaacgatggggtggcgtgtttccacgttgtgcgggactcgcgtgagaagctgcactgatcggaagtgtgtaactctcacctagctacaccttcttgaagcaaaggaattaaacataaaaagtaagaataaacctacatttgcgaaggcctgattttgctgggtttatgccttaatatgccttaattatagaccgctttcgacaccgctctagaccgtgtaggtagtgtaaattgaagctattcccgccctagcgtcaggaaccgtccccgaccgcataaaccactgaattaaagctattttcaccccacaaaccatttgcacggtcgtaacagcttctatacctataaataggtgcatacggagattggtataaattcttcagagagatttgtccgttcgcaacagcttcaacgcctagaaatgggatatgcggagatttgtatgacgggaatagcttcattctttttacaaagttagttccaaggttcgatactttgcttattaagccctctgtatttttatttctgccagtctactccgtaaaacacctatgctcggctctccataccaagagatagggcagggtctctttcgtctaatgaaacttgcgaatactatacgtatcggaccagtagtggagccatcacaacgccttttatgagctaaggtaagacattaatttcccaagcactctcggacctctcgtaccctaaagacgattgcttgttgatatgtgtatgcactttgaagctttttcctgacccacataccggaaggttatcccaaaattcccttaatcggaattccccactgaacccaaaagtaagcacattatttctctataagtcatatgctctcacttctggtttatcacttccttcttgcgtagttagtgcctacattagtaactaagacagcattcgggtgaataggctgaagggggctgaagactcttgccaccgagcctgccctggccccctgactatcctcacggataaagagagagcgcctatgaaggctatcaagcaggttagtattataatcctaaccctttatctattatctactagtaaactattatctataggtcttcccagataccatcaatatgctttccctctggcaaattgcgaataatattgagaggcatgcaaaaccggctatccacaacttcgttcaccgtacaatgaatctatggggttgagcttcctcaactacaatttttggcttggaagtgctagacaatcgactggtcgcatgtgcagcaaagaggcagatgcagcgtttttccctggaattgaagtattgcgatgaaatcgcggcgtatctaggcatgtgcctacggattccaatttctcgcccccgcaaatatcttcccacagagagttaatcgctctccttgaagtaaggggagtccacttcacattccgtatatgcatgaggcaatttgccttcgtacaggaaatcgcgtataatatttgcagcacatgaggaatccaccgcgatagagcaatggccataagctttgacttcgacgatttgtgaatcttgaaatgcctccttcgccgagcgggcagatgtaagaggagttacaggatcccaagtagttgatagaatcagcagcggatgcgccgttgtaactcccttgcgtggtacgtaagagtgtgtcctcggcatagtccactgctgtctcatgaagaatattttgctgtgtctagcgccgaacatactctgattgaacgaagtcaagatataatcaagtagcggttgcctgtcttggggccaatttttgggaccactcaggccatcgttcaatctgataaactcgcttgcctcatggcccatatcccaagaatcttcacgcccatatgcaagaaaagcatttgtcgcatttccttgaatgagactgtacaagttgttggcaagtgtaccccacgtggagggatagtaaagggctggtaaaacaccatcataccagagctcttcataccctagtacaccatgtgctgtattgttcacgtacacaccaattggctgttctcggagcctattcatataagaaaggaccgtatcgcgcaattccacagatgttgcgagcgaggatagtgggcatttttttgtgcctgctctggtacactcttcaaaaaacccatcaagtaccttgtccgtgtcaacctgggactctatttcaaaagtaccgtcgtaccatttgaattggttcacgacaccgtcgatgatgacacgtttcgaacgctcggggaacagtcccgcgtaggtctgccccagaaggctgccgtaactgaaaccccaataaaccatgtctctctggccaagtgcatccagaatatcattcatatcagccgctgtctggggagtgtttaaatacttggcgtgttctcccatcgtatcgtggcatgccttgacaaagttctgtgtccatgcatagacttcagggctgtcaatctcgacattgcgagatctgacatgagctaaatcctttcgagatttgacatcgggatagcaggaggctagcggcgtcgagctattaacaccgcgaggatcgaacgagactaggtggagcccttcgccaactatagccctcagctgctctgcattctggttgaggaattcgaaaccactcgctccagggccacctggattgagaatgaggttctgggttgcgttcgtgccgcgcatgcggatgagtggaatggtgaagattttatttcccgagttgctctggttgaattgatccatggggacaaaaacattgccgcactccacgaagttccccttgatgaatccacaaggctcccaacttatctgttcaccagtgtatttgagggtcctatgctggtgccatgttggtatttctaccgaccagtgtttgagagcaaacgaagaacagatcaaaatcaccgagacgatggcccaatatttcgggcgagaagcctgtaattgctgttttctggcgaaatctcccagcagaagtgattttttcatggtagtgttttcgcttgcttcagctcaagtcccgtgggtcacgaatatgaagaatgtggctagacaaaagatgagtactcggagtagaaaggcgctttcattcgggtgttgttatgttatgttgttgcctacccgtgcggggattccacaaggcggaaaatggtagtgtgtattggcggcgaaaacgtattcaaaagatcttaccccgtacatgtatcgccgttgatccatgttgtatctttatttgagtttcactggtattgtattgttccgctagtagtgattgcatggtaggaaccgcattgtccaatatggcccatttcggctgccgtagatattagtctgtactatcgaagacgtaagatgcttacttcgtatctcaataaattctctaacttgtcccacagctgtagtctataattctcagctgctttatgttcccctccaatatctaaactgacacatacgaccatagggtgtggaaaatagggcttcccgtccgctcagccgtactcaagccacacgccggtgagttagtagttgggtgggtgaccaccagcgaatcctcactgttgtatgtttttttttttttactcggtgtgaatgaaatatagtaataacatatgtatttgtggaactctataataactttttagaaattaagcttaacgagacataagcatttgacatatctatctgacgctatgaccatctagagagagaggtcacctgacccaatgatgacgatgagacataagctctaaaatgacaatcttgtggacaacttagtaaacaaaaacaaacaaaacaaaatgaaaggattttttttttcgccagaaaactgtgggactggtttttctgcagtaaaaccagcctggtaaatcacgtgatccatctgtatcaaggatgatgtcgaatttcgtacagcgtaatttaccactagaccataacaaaaactaaggttcttgtttagggcctagaggggccatatcccattcttgacagatgaaaaaatgacggtattcatcctagagtctgacatcaacttctcttcttgttgtacttctcttctcccttttctcaccacttcaagccgataacttcctttccccgttgtctcgttcctgagcaaagatccaaaattcctttctatccaagttcagaaaagcctcttctgttatttgtttgacttgcacaatctacaatgtcggacctgcgaagcttaagtccatccgtcacatcagaactctccacctccgaacttcaagtatccctgaatcatactttacagggctaccagcctttgagttcaacagacgacacacctttttttctccagattgttttcaagtacctgcccgcagacggacagcgtaacctgatcgaagacttatctggatgtcaagatgaccaggaggttagacaacttgccgagagcatagacacaggtcttctccgccctatgttgtctaccggtggtaaaacaccggcagtcactccctcatctcgtctcggtcttgaggactcgatcgaatacttgaacaccttcgatgtggaatccgtgacacgagttgaccagcagcgactccgccaggagtgcttagcccgcgatggctataaatgtgcgataacaggaacctgggatatggataccaccccacatccccccgggcggcctgtacacaagttgcaagcagttcacattcttcccttctgccttggaaattttcgcaccgacgacgagcgagttaaaatgtcggcagtatggactaatatctttcgatggtttccaaatttacggtcccgtcttaatatgttattaggtgatgttaatcgcgaagataacatcctaatggtggcttctgtttttcatgaagacttcggcatgttccatttcattcttgagccaacaacagtaccaaaccggtatcgattgaagaaattcccgagacgctcatgccttgtgaattatccgacggcaactttcatcacccttacaaacaatgataccgtttcagagatccaaacccagagtttttagctgtccatgcagctatcggtaatattctccatgctagtggccgtgctgaactgatcgagaagctcctacgagatttcgatggcgctgatcccttcctagcgaaagatggaagcaccgatatcagcagcctgctttccgtgagttgtctgtcgcttttgagttcccgcggcaatacaattcaaaatgacgaaatcaccaaggccaagcgaagacctgttcaagctgaactgcaaggaacggaaaatcagaagcccaggtcgaatgactcgggccatttgccacgatgagcgatacttatgtctttcttttacatgatctgccggttgcttgtcgttccctctacccccggcgctatatcactttctctttattttcaatctcatggctattagaagcatgtatcatggggatctccgatactggattaaacggctcatcccggagatctacggagtgcgtgggacgtactatgctattcatcattggtaccgacccggacaatgggatggtttgttgttgaaggccgccagtggtggggactcatcgcagccggagaagatgatcaaaatcgggaatctccatgtgctgaccttggtgggagatggggaatatctgcccaggcgtaaatcagtggacgttaactggattgttttgtagattcggatctttgttattgattgcacaatctgtctccgtatacgctctagaacagccatacggctataaggtgatacgtaaaccgtctctggcacggccgagaaaagaggaaggtcatctgtcacgaaatatcaacaagccccaaagatccaaaatagtatattaattttaaaatggtagatcttcttcaccgcccgaccactcaccaaacagcgcatctcaacacatcaccgttcacagctcaccacaagactcaccatgaaattcaccataacactcatatacctggttactctataccttaatagctgatatcgcaatcaatagcggcggaggaactctatcggatcacaaactaccaaggcagaaggaaggggaatacggcacccgataacaaagaaatttcattcatcaatactgcggtcttggtgattgaatttgcgagatctatctaaatcccattagatctttccaatgatgatgattcttcggactacaaaccagataacgaagatgttatgtaggtctttccttctccgattactcttggaatacttgaatactagtcaacgccacaaagaggcacctacacatcgctagaggccttattcttacagcatccccctgcgtagaatactcttaacgcgaatcttatcctgcaaagcagctttcacgtcgcggggctcaatgcagcgacagccgtgaccacaaaacctctcaaatcccgcagacaagcgagggacactatgatacatcagagtgtgaaaaccaaaatcttgaattaggctaaatgcatctatcatgctaaactacttagggtatgtctcccactagccgccattatcaaccagcggtagacatactggaagtagctatcggggagtgtgtcgccagatgaagaatatgtgtctcgtagcatttctcttttttgaatatttgaaaagctacagattgctggtgaagattgaagtaaagttaggcaaaatctcgtatctgttccaacgcatacagtttctcacttccagatacccctcaggccagttgctggaatcggtgagtgacgtcgaatatggaatatgcaggtgtcacctagtgctatgactaatcccgaagtttacccttaattccccacctaggaaaataaggtttacccttgactcccgaagattacccagaatcacaagacactgttcaagcaatgccatttgtggaaaatggaggactagagtcgtgttcgtattaatgagaactgtgctcttttaggtttgtacccgggaaatttgattcgatagttggccctgttccgattgagtctgggcctagggtaaaagcccattcccgcttcactcccacttttcctgcctgtggctaatcgctcttgaccgggcttagaacgatcttaagaccctccggccgtcattcttacctggcccaaccacttctcccttctcacctgactgaaaactcctggtggttattaccggcagcccctgcgaagagaagtgactgagtcttctcgtcgcctttcgtcgttttcaccttcataatgtctcaaatccaacaagaagtcaatgaaaacagccaaggggcaagtatccacattgcaaggctggagaccgaaccacatcgacgggaattcgccgccatctcaccaaatattgtttccaaaacacgccaaggggtcataatctttttcatcgttgcaagcaacatggtacaggtgaggcaatactcctcactgagtaaatcgacagactttgacagccgaccagatgatttccaacatggtgggacttgccgctggccttgaaattagtagggtgttgggtgcacctgttgggccggggaaagccaactgggctgccgcctcttatccgtgcgtaatgtgacactaccgctatagccccgttcgagacacttactactcctctagattgacacagggcacatttgtgctggtcagtggccgacttggctctgtgtatggtcaccgaaatgtgttggtcgccggctctatttggctagtcctatggtcgttggtgaatggtttctgcacgacgttcgtgtcattcaacgtggtacgtgctctttcgggtattggcggggctttgataatgcccaatgcggttgctttaattagctcaaccatcccacctggtcgatcgcgaaatataacgctcggattcttcggggcatctgcgccgattggaagctacctaggagctatctgggctggaatctttgttcaatggactagctggaaatggatcttctttggcctgtgaggtttttaagacttgacctccttcttcaagatactgacaaatgccacgacagggcaataatgggcgcagtcgttttcggcgccctgggagcactgctgccacccgaccgtcctgttgatcgatacggcaaaatagactggatcggtgcgctcttgggcacaagcggactgattttgtttaatgttgcgtggaagtaagtgtgtcttacatcgattttgtagcagtttggctaacacctcttagccaagctcccgcaagcggatggaatgctccgtttgaaattgtcattataactgtgtcaatcctgttattggcgctgtttggcctttgggagtacaggtttgcagacactccgattatgccgctggatatatgggcaacgccatcatttgccgtcctcgtttttgtggtcctgttgagcttcatgtccaatgggatctttctatggtacatggtcgcttggatgcagctgttgcgaggaaagactatactgcaatttggaattgagtggacgcctttcgtgatcgtggcaacagcgggcactttcattgcagcatggctcataccccggcttgcagctcagtggatactagcgattggctccgccaccatcttgattgccaacatccttctagcaactatgccagtacaacagatgtattgggcgcaggtttttccggccacgatattcatggcgttctgccctgattttgtctatgtggcagcccagattgtcgcaagtaacagtgtcaagcggcggcaacaaggaatcgctgcttcccttatcgcgaccctaaacctctatggtaacagccttggccttgggtttgccggcactattgagactgaggtcaacaagaagagacccgatcaagttcttggattccgggcagccctgtatttcggcgctgggattgcattgttggcggtaatcctggatatgctcttcgtccgagtcatcaaagatgagcgagagggttggagtgacccggccgatcgagaagaattcatagaggaaagctccaccacggcaatcgagctggccacatcaatggtacatggagaccggacgtaggtctgcgcagtctttcactgcaacaatgtatgtttgaggggggtgggggggtttgcgctgaaataaggaacgagtgaagggtcccgcacaacctgcaaaccatccctgccttcacaccatcaacgccttcgttaatctcctttctgttctgtgccaaccttggaagtaatgctcttccgtgatttgctatcggtccctaggctccctccagattgctagtctgatgcattacgttcccttcttactaggcttagtatttctcatattcggttttcactagcatttctgcccaacggacgatttccagcgtcctcatcttctatgattcctccctttttcggttctatacactttatgcatgggtgaccgggccaaccgcctagagcaaccgggaaggcattaaagcaattatcaataaataaaagcttggcgatatggggattaagccatcaaaaagtttgagtaaataaaaagaataagataaaaaaacatacaacagtgaggattcgctggtggtcacccacccaactactaactcaccggcgtgtggcttatgtgcggcagatagtcgggtgggtgtcgcccgggtgagaaatgggtgagtgctgctttacggtcgcgcgaccgggggtgataagggtaagtgcgctatagacagggtgagaatcagggtaagaatcacctaggtcgcgcgaccaccgcattgacccctttagctgaactaacggcagaatatcattggatcatattgtttcccttagaacactcgatatcctggcatctgtatataactagaactggaagtatcatacacctaggcagtaggcaagttggcaatactaatcgatttggttaatctgctcaaaaagctatcttgaaatcgagctaaacgcactcggcgggacttataactattacaggccaatcagagcttagtgtaatttagatataacttaagctacttgcctaactagctagtgactatttcactaaagtataccttatttgtcctgattatttagagtcactggaataaaatcctgtcgtagttgtttcgaccttttgattgatgggtcataatgaattcgactgccttcctcttttactcatctctgtataccttttaacttttcgtgcgttttatcacgcgaacaaatcactatcatagaagaggcctcaaatctcgactgcaggccctcaacttggtctgtttccgccttaggtgctattattgaatggtaccgtacagctgaccactaagagtttctctcaaggtctgcccgtaaactttcatatgagcttcggggtatgatcgaggttaaggtcatttaatgatatagttagtcgggacagaagttgctggctgaggacgtctcttctaaagcaatatcaatttcgggaccttgtgcttttccgtcttccagatcttactatttcctcacgagtcggggcagggatatgaggatgggagctgtatgtataaactcccttattgggcatctccataaccaaccaactccgaatcgagtacaaacgccagaaaacattatggcgccgaaggagattatttcgccgcttgcggagctgctcttgcttgacaccactcaaaatgggtgctatgtacgcggtctgtggaccttggagtccagaaactaactgtttgagtaactacctgggatatgaaagaacagagggctactccgatgtaatatatattggaattatgcataggcttcaagagcatatgcctcttttcatgcgctagagagtgaatgctttgaaccatgtcggccgtccattctaagtcgttattttcctaagcatgtagattgggggggatagaaagagataaacagaagcctaactaatcctcgatccgctgaaggttgaacaaccacgatgatggcctgtaccgtcaacaaaataaaaaggtctgatcaaaaccaagtgtcatcctattcataataaatgtcctgttcatagtaaacggaagcaggagtggtaagtgaccgcaaaattttgggtcaaataattattggcctatacatacaacagaaaagatagcgtgcggttggtattcacaagtactctgagaatttaacaaggggattgatatactcacaccccctttggctaatccgacacccctttggctaatctgataccccctgcctgaaaattaaggtatgcattcctaattgggtaccgcttttgcttcgacacctgtgcctgtctaccgcattccacaccgccttctaatttcatacaccgccttcgtgacaaagtctccatacaattatagtgacacagtaggtacctgcaatttgtatgtaaacccctaacaaaattaagtcactttcgttatattgcactccatatagacaagatcaaacaaattgatacttcaattctggtttacatacattaacttgccttcttccacctcatttttgacattcattttcatccaaatccctccaatttcatctgtttttatcagttttcatcctcaatatggcctcactaggccttgaatacctcgaatacctgctatcctcggattccgagacagagatcgtccccgagtctccacccaccgagccaatcaccaagccaatcaccgagccaagcactgagccgccaagcactgagccgccaagcacccagctgccaagtaccgagtccacaccaagctttacgttcccgcttccgccaatagaccagacgtaccctacctcggaggaagcgattgtctcgattaatacctttgcacgcccgcatggatatgcagtcacctctaagcgttcaaaaaacactaagaaaggggtgaaaaaggctgtctatctctgctgcgaccgtggctgtatatatataccacaggacttagagaagaaacgacggacaactacacttgccaataattgtccctttgcaataactcttcgcctcgacctctatatagacatttagcgcctaactaatgagaatcctacctataatcatgaatcctcaccgccgtctacctatgccattcaacggtcccttgcgaccgacagctgatcgaatgttagaatgggaccgctaatttttagcgcctcttggcccagaggaacatgtattaatccgaattccgagagctcggcgaatgtcagatatcagcgaatgtcgggattcttttaggggttataataccctagtacagaagaagataggatttagtggtaaagataatactgtaaataatgatcatggggtctttatgaacgtctattataagctatgaagacatcctagtataaagagagatctcgacattcgctaagacccctctgagcagatagatggtcgaaacgcggattaacacggattaatatattttccttcacgctaaattagcggtcccattctaacattcgatcagctgtaagcccggtcccttgagctgggtccacgggtggacggtacgctgagtaagctggaaacaggctgcctaggtggtccacgtgagagtgggtcacggtgacacactaacccatttccgcccagaggcattatagttcctagacttattccagctctccagctttccagctttccacctctctatctccacatctccacgtttcttcgtctcttcatcattttcataacactgtcaaccaatctcgtcgcgtttccacgccgtctatcatgtcttctcaacctgtcaatccgcctatgctgcaggaccatgatgccctgagaaaaatgttcgaagaaaaggccgactccatcttggaatggctagaatcgaaaagccaggtctcttatgactatgataccctccgtgaaatcggcgttcttctccaccatatggatgtcacatatgaccaagagtcccttgactttaagcttttatccgagaaagaatacagcacatacaaaatcgacagcgctaggatccctaaacatatgcgccatcactatgacggttttgacaaggcctttcatttgtctttctcatacccactatcagacccactaccaggcaccgaacttgtgtatgagaaggcctttcaaatcgccagatatatcgacatccttcaagactactctaagaaagatgatcccgataatacctcttcgatagagaaaaactcgaactggtatgagatcttgtgagttcggtcttcctctatttccccctattacttataactaccaagaaattgactggtttatttatctagggccgaggattcctttgaggatgggccacaaggaatgttacatggtttacatattgggcattcgaaacctctcgatctttcaagatggagagccgtaagttaccgacaatggcaagaggaccctgaggacccagacacaatccgcccgcatgttatgcttatgatatgcaccggcgcggtagcaaagtctaataaccttctccatggcgagattgggccgattgttaatacaatccagtgccgtctcctccaggaggagtttaagcagacttcgagttttccggtatagacctagtaatccctattataagtgagcgctaaccttataccactattaggttctcgtcatctcgctgtttggcccaagacaggggcgtatgctctatgcccgattcaacatcgacggtactttgattgtacgagcgtcagatatctttgatttcaagaagaagaaccaagagggatttgacctcttcatgcgctactacaactgcgaacccgaagatacggccgtcctatcgaaaactctccatctcccactatcaccatcggccgtacctcgcaagtccggaattgttgataccccaatcacgtcattctccgtatcggagaacgtcccccacgcggattagaacggagtttctagcattattagtgttatttcgtggagacaggtgtgagcggccgcttaatcgtggagaagaattcgaatggagcagggcgagattgttcagtagctagttacgagtatcccatagctaaattgactgtgcttcagctttgtgagcgggttgtgcgcggaaccattacggttagaaggctgaaataagagaaggcctctagcaggggcgtaagtagataccccaggaagccttcgacaacgaacgtaaacaagaagagaacatcatctgatttgatcttgtcggggagagaacgacagcacaagtacggctcgacaaccattattagtttgtgtgtgagccacagctttaacattcagcgagcacagtcagtagcgatgattgtccaaggttgcagagtggcgcgagaacgccaatgttggaataacggatgcatagggatgttaggcagaatgatggattcggagcgatgtggagcagcatatgtacctagaatagatatatactgtgtataagaccagcaaaggttgtgcagaggtggccggtccgaggaagatacgattggctccaggattgcccagaacggaaggtccgaggctctgaggacaaagtcgaacttacaggatggtcaggatatgagcagacagatgtttattagcaaatcgccaggcctatgtagaagatcgcagtacgtaggtagcgactagcaaaggaacaggtagcgttgaaatgtgtgtactggaagtgaaggcaaagaaaacgaacacaacaactctcctctcactctctcctcatctactccagaattcactgtcgtttatccacttttgtcaaaactctcttctataatacctctctgatcaatacattatccgccatccacagctgccatacgcctatcaaaccgcgtgtcgaaatgccgccgaaaaagacgatgacagtgcctgcaactgtcgaggattgggaacaggcagtgcaccccgatgggaccaccattgttgacatcaacgccagcattcacgaccagtaaaagcttcaatctagctccgcgatggaagaagaagacttcctacacctcaaagctgtttggcagaacgtagagtcgaccaacaaatcgcaggcacacattcacctcaggctaggcgcctggtttaacaaagctagccaggatctagacaattatccggatttcaaccggtaccttagtgcagttcagcggagagatgcgcctagctctcgtatcggtatgttctgggctgcttacgagcaacagtgtcaggtcgcgaaatcgcttcacgctacgagcaaggtgaagaaagcatacggtatgaacgaagagcttgtcaacatgtctcttgtcaacttcattcaggcagtatgtgcctgtcatcctggtctagatatcaattgcaaccccgctagggtccacttgaccttcgacttcaggcgggtcaaggacgaaaagcaggccaaagcaattgactcgagggttcatagcctgtcgtgtgaaaccgatggactgcttgagtcaacggctactggtcggatgtatgcgattctcgaagccaaagccagaccccggaaaaagcatgagccgaaagtaagttggcaagagacagctcagatggtgaccgccgcccttaatgaaaggggaacccctaagcacctccatcccggccggtaagtctatgagcgcttgcttcacggcatcatgtactaagacgattattagtgtcatccttttctcgcaggatggcgacgagctatacgtgtccgaggcgactatcagggcaggatatatcaagcatatgaaggacgaacgaaaggctcccaccagggtggacgagtttgttaaggttcagcaatttggtccatattggatccagttgagggaggacatgcaatacttcgcgaagctggtcctagccgttgctctccgagcgagccaggaggaggccacttctgttagcgagcaccgcctccgcccgcgtgaggcctgttgaggtcgtggagacattcccgtttgtactccgggttggagcaagtcgcgatggtcgcaccgaagaaacccttgttcctttgtcatcccatctctcctctctcttcaacacatccaatttctttctagaatggaccgatcaaacaagccctccgcaattggagtgggagcttcccttccccagcccaccctctctgtcaaggacaatgtcgtcgacgcttcgttgcccaccggccagtcagagaccgtgcacctatacggcgctactgtgacctcgtggaagaccggcggccaggagcagctgttcgtcagtgaggcggctcatctggatggctccaagtctatccggggtggtatttcggtggtgttcccaccgcgccatgcaatgtctggagagggtcatagtttaccattttatggtcctaacctggatgcgagaaatcgacagccgttttcagttcccttgagtcctagggttgacccttctgtgccatactcccaatctacattttcgccagagcaggtcgttcagcttctcacaatccagcaacaaaacgaactggttctttcccagaccctaatgagcgtaggcaaccctgcattttcacaggagtgtgcctgcgatttgtccgtcgactctacgttctgccaaacagctttgaggtgtaggaagtcttcttcttccatcgcggagctagattgaagcttgtactggtcgtgaatgctggcgttgatgtcaacaatggtggtcccatcggggtgcactgcctgttcccaatcctcgacagttgcaggcactgtcatcgtctttttcggcggcatttcgacacgcggtttgataggcgtatggcagctgtggatggcggataatgtattgatcagagagggattcgagtcaattgctttggcctgcttttcgtccttgacccgcctgaagtcgaaggtcaagtggaccctagcggggttgcaattgatatctagaccaggatgacaggcacatactgcctgaatgaagttgacaagagacatgttgacaagctcttcgttcataccgtatgctttcttcaccttgctcgtagcgtgaagcgatttcgcgacctgacactgttgctcgtaagcagcccagaacataccgatacgagagctaggcgcatctctccgctgaactgcactaaggtaccggttgaaatccggataattgtctagatcctggctagctttgttaaaccaggcgcctagcctgaggtgaatgtgtgcctgcgatttgttggtcgactctacgttctgccaaacagctttgaggtgtaggaagtcttcttcttccatcgcggagctagattgaagcttttactggtcgtgaatgctggcgttgatgtcaacaatggtggtcccatcggggtgcactgcctgttcccaatcctcgacagttgcaggttcagcttcttccgagaatccaacaagaaaaccaactgacccgtgtccaaattcaatgaagcatgggcaaccctggacagccacaatgtccaatgactctgcaaccgtcatcatttcccccgagtgccgagagggatctagtaatgaaactagacgcacgaatcaaagaactggaataaagtgtccaaagtccggaagataaatccgacccttccccgcctcaatgtcaagacaagtcgcaccattcgagacacaggggcccgcttcaagtccgttcaagccctgcccaggagtcctctgtctctcctagatctcctgcccatctcggtcgcagacaaagtctagctctaatagatccgacctccccgacaggcccattgcaaaataagacacagtctgaccgcgattccaagactgtgaaaagataacatagttccgaaagggccctgataccaaaaacctcagtccaatctaaccaacccatcggttccaagaagcggtccccaagtccttccaattgctaccctcaacgaagaagactggcgaccgcgaagcggttgaatcggataaactccttgatgaaatgcaagaggaaatcgacatgtactgggacagattgcgttttcaacgcatgcaagagaaacttctggcccggactctccaggcccagttgagggagcgccgagctctttgatatattctgaagaaagcgaaagctgagctcaaagacctggacacagctgatgtcaggtctatattgggtccacgaattccacgcactcaaattccagacttcatcaggaggaggatatggggggaacatgcgaggaagaatagagggggagacagatcctagtgtggattaggcgggtttggaccctgatcggcgcttttgcttcttcttttttctttggcttttaatatgactccgtgtttcttacattccggagaagctatcacgaagatcataccacaagttgttctttaattgaatttccaatacttgaactgctgagtgtgtggctagctcgtggagctagataaatagtaaaagcccctacagaaccaggtcatcttcacgttaaatcgagaaagaaaaaggtatgcacaatatgtacatctacagcctcggccccttcgaatgtcccgtatctatcccatcagaactcttccggtccgaaactaactcctgcaccccagtttcgcagtctaacactccgatctctggcagaagttcctgttctttgggctgattggcgatcgtttcttccttaccctcggtcctccggcctggtggaataaacacgttgtagtatcttgggaacaccaaaccgagcagaatcaagagcaaacagaagtgcgctaaaataaacccagcgatcaccattgggtcgtaacgtagggtataagattcaggatacgcgaagctgaacacaatggccagaataggcgcatagacataccggagtagaataggctagaaacgagggatattccagtttctattactactaacgatagtgtttaggtcacatctcaattgattatcctggatacgttagtttctcttagcgcgagcttgttagcagcgggaaatatacagagtagaatgctagatactaaaattgactaaggaaagggttctacccctagaagctagtagctctaatatccggggttataacgacgaggatagaaatagtcgagcagacgatatataacctaaacctagtactagcgctagctaccggattcgaggtactgtatatattgtaatatagcctattaggctgactctgcggaagatagaaatctatataagaaactagataaagacgctctagccgactgtctcactaataagatccttagattcgtgggttgcgagataggagagccgcgctaagagtcttggggggcatcccagagcggagatggtgtgcgatgtcgcagtcctgtaggcgggattactatcatgagcaaagattagccagcttggctcggtcatgtgaggtgacctgcaggtatctcatggtccacaacgagtggatgcagggttcggaggagtgccgaacgagctgaggtgtccgaaaaacagtcgaaattcccttcagttgccaaggggcctcctagattgcgcctagggtgatagtagaaacggataccttctgcttgcttctccgataagagttagattttaggtgcttacctattacgctggtttcataatatttttgatataggtgatataggtgattcagcggcgtgtggcaagactgatacactacctactctgtaccgctctatgttttagcttgatgttgagcagatacgtgcggaatttgtgacttctcgtccagagacctatagaatttcatccaggaaccaatggaatatactacatatcactaaacaaagctctggcttgggaagttgggcctctgaacttcgatactaaaatttcaacatcttgaaagtgagcgggacattaagtatataatgagacaacttctacttgggttcatcctgttaagcactctatgtcttagtgtaagattgggccgggccgtaaaataaggatgtaagtcgttcctcgagcttgagtgctggtggtgccggtaagttgttattaagattaagttcaaagaggaatgctggatagtcaaaagcttctcacgggctttcttattcgatggtggctcatggatgtcctaatcctgtcttgggttcatcatcactttctcgttgccctaacggtctaatgataattttaaattcattggacgcgaatcttcagcgcttgaacgctcatgaggatcgtgtggagatgggaggagaaggagtccaaggactatatagaagaaatgatatattttcataagagactgagatattatatatggagtatagaggtagatacaggattgctaaaatagatgatgggaaatgacgtcagcctcctcttatttttcactcgcccctcatttccatatgtttgtatattgtatgttattatcttcccatctcgcatttcttcttggataatgtatcgtgattctggctacccaatgccgacgtgggccagggatagatgacgttgtggaagggcgccagatttccgtcaagtttctatagtttgtccctctcttttcctcctcctatagtccatagtgaatataactgtgttccctccttctctcttcctgcagtagctttctcctccgctgacactttcccatatagtggagccatctagtacagtatgctcctcgctatatcgcttagacggttcgagcgtactctaaggtccttgaatttaaggtcccttatgaacgttacgtatattataaacctaaaccaagtttcgctgaagtattagaggatcacgtagtctaacctggtcagtaggaaattatgcacatttgcatagcttctgctttgtggtccaacgggcctttttgcctttttcttggttctcaattctattattgttctaccttctccatagtaatatacatattttacagtactgtccatgatatccataccgactctgtacctgctccttatgctaagctgaggaatgctaacaaaatattgtatgtggagttcagtagagtcagctctgcctcggagtatgtaccattgaatactggagcgggggttaatgtcccggcgttgattgcggaggagaataccacctggctgaggtcgtgaacggcgcttgttggaagggtattgccaataaagtatgcacggatggcctctgtcagccccaacgacgcaatgctgactgttgtatgacctgggcctcgtctggtcaccaaccgggacgcggtagcaagctgactctgcaaacgctctgcagaggccaacggagtcacggggtcatgttcgccattgacaatcagcaccggggtattttgctcagtgaggatggagtttgcatcgcggactttcgaggctcccaagttcgggattcttgcgcgggtgtccggaaagtggcgacagaaggataggggagtcacgtcagcattcagccaaggggtatcctcgcggagagagacattgagtactagggaagcaacgtccgccaaggagatgccactggacggcgcattatccacacactgcaggggccattcagctagagacccagtggctggagctttggaattggctggcggactggcggcagctgcattaagaatggacactattggagtcgcatctccttgctcaagagcgctcacaactgaggagataaggggccaagtagtcggaactcgggaaaaggaccacatgaatgcgctgaagatcccaacggtgatggagaacccttgagagaccggaatgggatgttcgtagagggaatcttgtaaattagcaagtcgagtggtcaggtcggcagttacatttgcaggaggagtactcagagcacagccagctggaccagcttgttcgcaaaatgacaccagatcgttgatagcatctcgcacggagagttggtcattgggaagctgggcgacataggtctcagcattggcagtagcatcaaaaacgccgtccaggacaatcctcccgaccctctccggataggtctgaataaattctaccccaaaaatggtcccgtaggagagaccccagtaattcaaacgggcatctttgccgtccaatgcatcgacaatagcccccatgtcacgaacaacgtaggccgcgctagaagtatacgaagctgtcgaattgtaagatgcacatgcggcagcaagctgggcggtcatgctgtcaaactcctgcatcgcagcgttgtaaaagggcgtgtaggattggtttctgaactggccgtacgccacgtcaggcgcagctggaagcacctgggacgcttcatactcttctccggcggtagcaaaacattgcaagacgggttgagcggaacccacaccgcgcgggtcccatccaattatatcgtaaaaccccccggtgatgttcgatattccttccccggcgccgttcacgacgaaggagacaccagacgcaccaggacccccaggattcgtgagaagtgagcctttgcgctgggatacctctaccgtggcgttgtatcgggcaagcggaatagaagctgacatcccgctctgtggctccgcatactcaagcggcactcggagggttgagcaatccaacgctggatttgcaggacagggtgaccattgaaggctggcaagagccgtagatgccgacaggcatccagcaagaaggaagtacttaacagaagagagagaggacatcttgtcttgtgttcatggctcgcatgtgaattatgacagaaatctggcggtacaacaatatatgagtaccctcaagtggtattgaactctaattgacgaaactgacaaatctctaattttaatatgcaccgcgagccgacaaaataagcatcttcaacacgttatcagcaaaatacagtaactaaactctatggcgaaagcagaaggtcaacggacgtaataaattaccatttatgaaaagggcaggttagtgcctttctggccatttattggataagttccgagcgatttccaccacgcccatttgcagtctgatccttcactcgccccgatactccttcgataatatacaccatacaagaaaatattgtcaaagtagagaacaatgtaaaagagcgcactctaacagtacacggcacggttgaaactggccagcggcgaaagggcagttataactcatggttactcgtcacgatcggccttagtcaagagatgtgaaggccgatcccaacaatatttcggccagactgagacattggagtctccggactgttctttgtccctgctgtaggaaagtgggcgcgggttggatggtgagtgtggcggagtggagtggagccgatttcttgcagtctggtttggagtagggtagtagatagtattaccctctttttcctatctatcttaatatttacgtataaagctatataatatagtatatataagatactcctagagtgattttgggatattctatttagagaacatattataagtagtaaagaaattcaaataaaatcataatagagtgagaaaagagccttagaggttatattatatatttttcttagggccggtataggcttggaataagttagcccttattaccctaagggtgagaattgtcaccctattcttacctctctcacccatatcacctatgctcaccctagagtgccgcttaggtactagggccaaattgagtattgactatgtagaataatgagcttaagtacggctgagcggacgggaagccctgttttccacaccctatggtcgtatgtaccgaaatgtatatcggaataggatatgtagtacggcaggttttagatgtcatcgactaattcttcaccgcaataataattcatatataggccaagcatatgcctacccgcccggataataagatatttctgattcttaaaccaagctgcttatacacacaagcacttccaagacctccgatatccgcggtttggaaaccaccaaagaaaaatcatacttactgtgaagacagcaagtgtggatgtggtgaatgaacacacccgtgagaatctgaagcagaagccggcaagagccatcggcgaaatccctttctcttttgcgcatcacactttagctgttccacgtcagtgtattgacaggtccagcatttgtgtatgatttctcgggaaggaacctggaagaccgtcaaggcttggaaattggccaacagaatatattcgcacgatttattggtagtcactatcgccgatttcgtcatatgggcgcagtccagttgtgatcttgaatatcagacaacctagcgcaaagatatctgtcgcggtagaccgaggagagtcaggagctattcgataccgatcttcctctgagacaagagtgtcttgtcctccaactccaattgctgagccaaagaagtcgcagagttttatggacaagtcagcgacgagaaagttccgtgtactgatatcaacatggactgcggcaatgcaatcattgttaatttgactaaacccaattaggaatagatgatcttggctcaggtgggtacccgtccgtggatctaccacggcgccgtgatcggtgatgagctaatccgtgtagttagcatccttcatctctactagccaagatatcaatccaatgcacgtgtcttcggcaaaaattccttttccaaggttggagtttatatggctcaagcacttcaatcttggctggcggtatatcttttacacactactcgacacctactaaatttgttcgaatgaatgtgataactggcatcgagtgacacagatactctagatcaccattggagagtggaacaagcagacaatcgagttgtgtgattaattcaataagctaggctataaggtaacatctttgcgtcgtttcccaaaaaggaaaataattcgccctcgcggagggatcccgacggggccatgctaagcttcacgcactgacccccgaaggtggctaattagacgattatggcgtaataacatagtacgatggtcgcagctgaaacacacgctaagctcaaggagtctccacagttctaagagtgcttggtctataactatttccccttaaaatagtgtgattctctgaaagataggatcagctcgagattgttatacttacaaactgcaaatcgagaatctgccccgtttcctatgggtatcacatacaacttggaccgaaaacagggactttatcaaagtataatcagatacgtcttctccgggcgcgatgatgccatttcggccccatgccgacgaagagaatataacctggaagtcaagaactatgaatttcagttatctgaaaagatgagtacaatatcccctagcccgaaaaatgccaccagcacagtggctcccgtcgtcgagacccacctgaaagaggagagatctctagtaagtatcatgacctctaacgcatggacttatagactaacggctgcaggtatggcgtctggatctgtttttcttgaccattggttttctaggctatgcattcaaatatctggaccagacgaatattgtgagtacgttcgcaatctggaaaagaacacactctgactgactatctgataagagtaatgcctatgtctcgggaatgcagacagacttgaagctatatggcaatgagctgaactactttacaacctttttcaagtaagttgttcattgtttgatagtgatgtccctgctgatccgcaatagcatcgggtatatggttatgctgtatccctcatgcatcataatctcccacatcggtccgtcagtctggctacctgcctgcgaagtaagttgaataaatccaaggcttatatggatgggattgaatatactgacaacagataggtgatttggggtgttttgacttgctgtttatccactgccactagtgcaaagcaggtaaatacattcaaacccctcgataatatcttccccaactcatagaatcctaggtatacggtcttcgattcctaatcggctttttcgaaggtgccacttggccaggttattttactatcatcaggtgaaacgcacagctgctctgccaccaatatatatactgaccttgtccagccaatggtatctccccgaagaaatggctcttcgcatgagtctgtataatattgcccaaccggtcggagccatgttatctggtgcgatgcaaggtgctctttcaacgaacctcgagggtgctcttggtcggagcggttggcggtgggcgtttatcatcaatgtaagatatttggtatctacaatggggaacacgtcctaatcttctagggtgtctgcactatttttattgcattagttgcatttgttctcttgccaggatttgtatgaacctgtctactcctctagcttccttgcagcatgctaacagaccctatctagcccgatcgccccaatccgcttgccaagatatacctcaggcctcgagatatcagtatgtatactattctggaatcacattattagaaatacatctgctaatatagcaatgaagtcgtcgccaaagagcgaacccgtcggatcaaccgcagtccccaggtgggaatcactgtcaaatcattcctgcgcagcttcaaattctggcatgtctggttatttgcaagtgagtcgactatatctattcttttcttttccaagctagatcattctgacactttatagtttcctggtccattggcacgggaactacacctgcaaattacttcaacctctggctcaagtccttgaaaaaccccgacggaacgaagaaatagtaagaatcagccctcctctttctggcgacaaacctgacagtgtcttcagctcggtcgctatgcttaactacctgccgatcgcgggccaggctatacaactggttgctgagcttttgttcagcggcttcagtgattatctgggaaccagattaccatttttgcttcttcactcggtgagtatatctggcgagcagagtagagcggcacctatgatactaatttatattttctaggtcataaatatcacatctcttattatcttgatcatacggcctgcaaatgaacatgcgtacatggtcggttggtatatgaattacatcggagcgtgagtgctcccattctactcaaaatttgcaaaggttttttctctgactgaaatagtgtgtcgactatgctactttgtgcatgggcatcttcctatctagagaaagaaccacaagcccgaacagtccttttcgccactggaactctcttctcatacctgttcagtgccttcttgcccattgcggcgtacccggcttcggaagcaccccattggagaattggtgcaaagctctatcttggtctctcttgcttggctactgcactcttcgttgtcatccatttgattctcagacatgaggcaaaacgagataagagaaacgagacggctgaatctaggtccgaagaatcactgtaatgggagtctatccgtgaaggggatgcgatatcgataggtagagcggctgtgatgcatatatattacgtgactacaatacgaaggagaaccgatcaatagaatatatgaatgatagccgattataatctaactgctgccatacaactctctctagttatagctactagacgatcacgcacaggttatgagatcgcgaaaccaggaccgaaaatacaccagtaactatttggtggctcctcgcacacgtatcacgtatatgggcgacgaatcgtgccactacgacaatgggactttttggctcaccgctctaatcaccgccttagtaattatggttttaggacggttccatggatatctcctttggtaaacactgctggcatatggtatataaaatcgaaataaagcaattgagagatgaaaaactaagagatcacctgttctaccataaagctattcagagatcacctgatttatcattataaagattcgagagattacatgatctattacggagtatcatgaagctattcggagatcacttaatctatcactatggagcaattgaaattaattctactaccactaataatagagataattaaatcccaaaaacggcattttaatactagatactacttactatctaattaattaaatacaaccggtattttacgctattcatggttcaattgtacgaagaagtgatttaattttgacgatatagatcagatgctacggagtacagagtagtccaagaaggtaaaaataaaatgttgtgcgcaaatggtaaggtattatataatcagatcacgtgcgttgccgactaataatactggcagaaataacaagatatacaatatagtcgtaagagttgggggaggggcccttttataccccaaaaccacgtgccttcctaaaatgcgacagttccctcgagccttctttgtcaatgtcaatgtcaatgtcacatgcattgcaccttctttgtttgccttctttgtttacacggggaactttcaatgtttgggaaggaacgacattggcttcagggcatcaagtgcaattgaagtccgatattagatcgcttagggaatgggaagattggaaaattcagtccaagcctaaaatatcttccaaaaagatcaaagatcgtgctgaaattgttgaaatctgtaccagctggatcgatgagtggcgtcaccgtcacccccaacacaagaaccctcccattgctgctcactatttcctcttgctcatctttatcatcacgatgatcgcatggtatagataattacctctctatatgtataattgtagtatccctaggtagcagctctatgaatttctttattgccagcgatgtactcgcttttttcaaactcaacctgctatgaggatcatatactatactaatacatctttcagtacatacgaccatagggtgtggaaaacagggcttcccgtccgctcagccgtacttaagcnnnnnnnnnnnnnnnnnnnnnnnnnnnnnnnnnnnnnnnnnnnnnnnnnnnnnnnnnnnnnnnnnnnnnnnnnnnnnnnnnnnnnnnnnnnnnnnnnnnnnnnnnnnnnnnnnnnnnnnnnnnnnnnnnnnnnnnnnnnnnnnnnnnnnnnnnnnnnnnnnnnnnnncgccggtgagttagtagttgggtgggtgaccaccagcgaatcctcactgttgtatgtttttgtcttgttttttatttactcaaacttttgatggctcaatccacaggtcgctaacttcaaccacgagagtgttggatatgccaacgaaatccactctagcgtctagagtacctccaaacaagcaattcccatggttcgccccacatggtcactttaaccctttactcgggcctggatcatcttccctctcgtcttcatctcaacttgctgatgacttccaggaagaaagcgaggcttacgagacttacgatacccccgcatatctccagaagattgtcgatgatattcgtaacctggaaatcgtgtatttcaccggtcgggatagtgagtcgattccgttttctgggtggtatgagtagatctatatattaagttcaaacctcgaaccttcgcgcttagcgatctagcaaacaatctatctaatgaagtaaacaatgcaaacagcagatagttgctgatccgtagagtcatagaacagacaatcatgcagacggtaataaatgtcacgatctactatagatcgctatcacatgcttcatgtttgcttgcttgctcgtttgcttgcttccatagattgtttgttaaatagctaagcgaggtttgcaacgtttgcaaagtggttagcagctatataacaaggttgtttcccattatccacttacttactcttcctctccatcttcggtatttcgttgaatacactctttctcttctgatcgacttggcgcttcgcagtccacactttgataggtcagggcgtcaactggccctgcctggtcttggcgctttggtcgctcggcaactcatctcatcacattccccccccagttatcctcatctaaacccactcctattcatcatccattttcaaatccctcatcttacgaaatatgtcttcaaaaattcaagtcgtggaaacacgtgaacgtcaactcgagcgctgggttctgatgaaaatcgagcatgcaattgagaaacttgaggagcataaactcaacgcgacagaactcgagaaatggaaaattagcttctccagtatgagtctcgatcagaactcagagcttaagccccgcttcttcgcaccgaaacctgacctcccgccaccaaacgatgagatactcgataaggccgctgagcctaatgatagtgatggacgctattatttaggtgcatacgatatgaacaatttcttaagctcttatgccttccaccaactaggcctccgtgataacgggccgtggcatttgatagagtaagtctattgctgtctggagctatatcgggccatcaagggttgggtatttgtcatttcctgtagaagcaggctgtgagcttcatggactattatctaacgctagtcgatagccctggtcaatataacgcttacaagagcctttatttccatgggtctccctcgcttggcccgtctcctacatttggcgcttttaagataatagatagtcccggaaaggaatatccgcatcttaaagcagtcatatataccgatatggaggcggatgacaaaacttgtttccgttcagaggtcttgatcagccttcgcctaatgttggcccaattgagaaaggtgcgcctgatgcaccataagatcgcaccggtaattatcgattcttccctttctcctattcctttattctatgcttctggggttactaactaagtattctataggtcttactcgtctcgttgatgggaaagcatgtacgtatactagagtcctattttgatggcaaattgcttcaaatgcgctctactcgtctttacaaaatctccgactgggactcgattaagactgtgtacatgattctcaccgagtatttgctcggccctccaatcagagataccatctaggctggggtatcttcttctattcgggttggcatgttgaaatgattgaatgaacatcaagtgacttgaggagatgtccgacggcccagccggggatccacatgcgcaatgaacagataaaactcccatttcccccagaaaagatagatattcaagcaatacacacatcatgaaacaaccaatctcattgttcccatactcagtaatctaaacatcaacgtggcataggaggcttcagggaatgcactcttcagttcaaactcggagcctgccatagcccgaagaggctacgacagagacaaaaatctttcaatctcaagcttcttttggggcgtcatatatataacagacttttgcctttggccatgatggataggggatcgcgtttccagataaggctcaggtgcagccacagaggactcaggccctccttaagcctacttcttgcgctgataggccaaataattctagtgatgatgattccccaaattcacccggaccagtcgcctcatccaaggcaaatggagatctgtcagggtcgggactcctaggaagatgcctgactaagccaagttttgcagcgccattatcaagagcaaatatatgagtgagaaatggattccatactaagaagtacagattttgcaagataaaataactctaatatgtcaaaagagccgtgtgccttctttctgtatgtacaacatatattgcagggagtgtggccacgtgattacagcattattgttttgggtctggtggggcggtgtaggcttgtttactttgcgttaaaagtggatacaaaccccaccttaccccacctgggctatatatcgtatcagccgactgcaaagaacctcatttcacaacgctaggccagtggagttgctgttgaagggtgctccagtagtattgagatggtatcttgggagtgtcacgctgcggtcataagttatataatagggatatggttgagaatggcggccagagtattatttgattgatcacgtgcacctggttggtctgtaaataaaacgagcgcaccttactcttcacgtacatacccctacatttgagatttcccatattatatctctgccatcatggaatacgataggcgtcttgaccttctgcatgaggtagaagaaaacatctggcttgacaaagttgtaaaggcccgctctgtggagcttctgcacttgggtttcaactttgcacccacagcaactcggtggccttcctcgtgtcaacagtctctctggcagatatgcagacgaaaaggttgccatggaggttgaggctctccatcttatctgccagatagacactgattgtgattgagagtgcatgagaagtttcagaaatgcatcatcagcggctggctacacgagcctatcatctcaagggaaacccgaatgttcatcaaggattgatgcacgtcaaggcacaggccaagatggccagcactatagggcccattacttctccaagggcgcgaagaaagcgttaaaataatcaatgttattcgttgagaggtgtgctgattatgcactggccgccatgacaaaaatcctcggcggttagagaagttggatagatcaccaacaaaaatatgattcgatctcatgaaatgaaggatgaaagattaaacttcaagcatgccaactctggaagcacagtggtatagtggtcacagatgaggttggttggcccacccgggcgtatcgcagtggtcatgtgcgaaggggcagagcggccaaaggtcaaacgcctggtgatcgcactcagactaggggcgccaatatgagcattgaccatgggaccaacgtgagaggtcaggagggcccccctgatctgatttctgaatccgtagggttgatgcctaaatgtgcctgaattatgccttattttaaactgtatattataccacctggggcatgacagagggcttaataagcaaagtatctttccaaggttccaatccaaggttgaaaaaatgaggctattcccaccatacaattatccgcatacacccatttattcataggcgctaaagctattgcgactgtacaaatgatttgtggggtggaaatagcttcaattcaatggtttatgcggtcggggacgggtttcaacgccgggattcgaaaaacctgatgatttttggggtcgaaatacgtagcttaaattttgggaagttggagatttgtaggaatagcttcaacttacaatacacggtatagagccgtgtcgaaagcggtctatagtacaggcatattcaggcatattcaggcatcaaccctgcaaaatcagccaggcattcgacctttggtcgctctgccccttcgcagtcatgtgatgggaggctggtgctatccgaacgcgacttcgtgtgaacttcgcttccttaacaagatgtacgcacgcagagcttgcgagggctttcgatataggtctcgcgtactcccttcttctagagtcggacaagctgtcttgacttgtattccatttcagaatactgtcgatatggaatggttacgacgtttgatctcgcgccagacgcacacgtcctcgacgcctgtttccccccggtcgcctactaatcctaccataagactgcgatgaggagagtatgtatcactacacgtccggtcgatggctttggaatgagaaagaacagttgtcccgtcgctatgtcaagttcaatctggcagagctcgtcaagatcgcaacccgcgcgacagggtcaaagtcctgcgtcgaagtgcagaaactcccagaaggaaatttcagcaaagttttcctactcacgatggaggatgggaaggaagtgattgcaaagctcccgaatcctaatgctggaccgcagtactttaccacagctagtgaggtggcgaccatggactacgtgaggaacactttgttttatttcgcgacgtgctattttatctgaccccgatttctaggtccggaatgttctgaatattccagccccaacggtgtatgcttggagccttcctaccgaagagattggagccgagtatagcattatggagaaaagccgtggggttgcacttggcaaggtgtgggatgatctgccgggtcctgataaacttaagattgttcatcgactcgctgggtttgagaaggctctcgtatccacccggtttccgatgtatggaagcatatattatgcagacaacctacgcaatatcgacccagatcaggtgattgagcttggagataagaagaacaccgtgagtgtgaaatttgcggttgatccaaccacgaatcgaacgttctttgatgatggcagaaattctgttaatgtccagcgaggaccctgttagtgtctccctcggatcgctggcgaactgtcctaatggatgttttacgataggggcatctcttgaagattatgctttcgctcgtgccaaccgtgaacttgcttgtctgcagaccttctcgaaattcccacgtccacaaggattattttatgggccaggtcaataccagcccaccgctcaacgaaagcaagaaacactgcaaaatttcctcaagattgccaagtttctgtcgccgaaagacaaagagatatctaagcctgttctgtggcaccccgatctacacggagacaacattttcgtgaacccggatcagccaacagagattatttctattatcgattggcaggccgtgaatttgtcgcctctatttcttcaggctcgccatccagccctgatagaattcgaggggcccatccctgagggattgaaggcaatcagtctgcccgacaatttcaatgaactcagtccagaagaacagctcgaggcgaagaagcttcgtgctgcccagtctctctacaaacattatgatattcagatgatcgaggactgccctgagattgcagctgctctaaagttcaaaaattcgctcgctggccaaatcatgggtctttctggctctctcttcagcgatggggaacccattgttcagggtatgctcataagactccaggaagaatgggggtctcgtgttgggtcatccattccctgcccactctctttcaccgaggaggataaggaacatcaaaaggaggacgagacaaagtgggctagtggtgttgaactaatggaggaattcctcggtcaagtcggtgcattgggacggttgggtgaatcacaatagctacgagcacttcaaggcgcggctagaagaatgccaggaagagttctggaactctcactccaccacaagtgaagagagaaatgagtggaaatcagtatggccttttacagacggccaatgattttcataggtgggtaggtatatagcttaaataggtttgttcaacgccgtcggtgactttctagttacctagcacttcatggatcttaggtagatgatatacttgatcaccgaaacattcgttcatatgcgacactgtcacaatgggctttttgagctacaagacatgcgcatgtgtatgggtccgtgagacaaacccaagctacaccttccaaagttaattccaaggttagttttctcacggtgggcgtttagttcttagctaatcagccttttcgatgggagtccatctgataagcgaggacttccatatcggacggatggcggaacggaacaaatggcgactttacgacgtcattacctgcctccatactatagaaaaactgtccaaaggctgcaagtatacgtgtgccacagctatatcattatctgagacccggtctccgattatgccattagcggtgcggcgtgaccggcaaaatccatagcagattatgatctagcgcgctggcacagactctgtacatagaagttgccctccagggctatgtggattgatgatgtcatttttgccttagtcaactatgacctacggggtaactaactatgtatggagtatctaggtactgaagaggggacccctgaggggtaccgacagccctgcctgcgaaacaggtgtgagagcagagtcgtcactgggagtaatagggtgctagagaggagaacaccatgaggtgactactgagaatggaagtggaaaggtgtctgcggtgctatctagttatgcctcgggagtgcttttatgtcacatagccgcttagtcatcctgctctggaaacccccactgcagtacctaggtacgcttgtaccttacacagattgccgtggctccaaggttataaggttataagtgatggtcacttgagattcccaattcaactgaactcgtgtaggtctgtgcatcagttatgaattcggtttatgtccgaagatctcccgaatataggtattccttgattggctatggaggtatggtatgtaatgtaggtcccggtgtacataggtgtgtgtccactgtcccctccgttcctaacttcatcttattctaccctcggaaccagcagggatgacttcatatgtagctttcgtgtgggtttcccccgggtctttaagtggtaatcaggactcctatccacagatatgggcaacggctgtatgtagttctgacgtcaggtcgtgtggagaatgccaagaatggcagggacctctggatcgcagatcgaaattgacagggtacttttattgtacttcttttagggatattcacacggatattgagcaagaataacatgagactttaaattgtatatatataaaaaaaaagaaaggttctacaccttcaatctcatcgatatcagccctaaatctcgatctatactgtgttatacgccacggccgccaccactctgtggtgtagatccactataaatccggtttcagcccgtggagtccccattaacacatacttggtacatacttcctacatataacacctggagaaggtccacaatcttttttttttctccttccccctttgctccctcccccgcactcaaggatgtctaccccagggcaacgagagcctcaggctgttcaccatgagaacaccgacagtgaagccagcgtgcctgtcgatgtgtccgccgcaattgaaaaaaaagagagcgagcgttccgatggaaagcgcgagctgaaggaagatgagtgctacgagattctgggatactgctggccacgatggaagaaatggacctatctagccgcggtcgcgtgcgttcaggtctctatgaacttcaacacttcggtctaccctgctgctgtcaagggtcttgccgaggcttttcacattagcgagcaacatgctcgcacgggccaaatggcttacctggttacttattctattggctgtgagctgtgggctccttggtccgaggaattcggtcgctggcctatcctccagctctctatgttcttgatcaacatttggcaactacctgcagcccttgcccccaattggggcagtgttgttgtcgctcgtgcattggttggttttcttccttgctaagctagcagtttaacaatttgatgaactaacatgatatttagggtggtctctctactgctggtggtagtgtcacactcggtcttattgccgatatctatgaacccgagacgcaacaatttcctctggctttcatcgttctgtcctcttgtattggtaccagtattggtggtgtgattggaggaccaattgcccgttgtaagcagccactactctcactctgcaacattttacaacctagctaacacgtttgacacttagtccttgattggcaatggttcttctggattcaactcatcttcgggggattcacccaacttatcatcttcttcatgcctgagagtcgttcgaccattatcatggacagagaagccaagcgtcgccgcaagaccggggaagacccaaatatttacggacccaacgagctcaagaccccccgtgtctccctcaaggaagccggcaagatttgggcacgtccattctacatgtttctgcgcgagcccatcgtgctttgcctatctcttctgtccggtttctccgatgctctgatcttcactttcctggagagcttcgccatcgtctacgagcaaggatggggcttcggtaccctcgcacaagcgtgggcaattattccaatcaacgcagcctacttcatcgcctactttagctacttcccgtggttcattcgtgaccaaaagctccggcttagacatggcgatgccgccatcccacccgagcgccgtctcaagtggctgctcttcctcgccccactcgaacctattggtctattcggttttgcctggacatccttcggcgactcaagaaacgttcattggatcggatccatgatattctccgcctgtgtcggtatcgccaactatgccatctacctctcgtctgttgattatatggtcgcttcctatggtgtgtattcagcttctgcgaccggtggtaacgctttcgcgcgtgatcttctcgctggtgtctcggccatgtacgcgacgcctatgtacaaaaatatcggcaataagtggcatgtggagtatgcaagtactattctggcttgtctttcctgtctcgttgtgactcccatctatgttttctactggaagggaccgcagcttcgcgccaagagtaagttcgcctctacgcttgctgccgacagagagcacaaccatggtaggcgtgtcagcaggatcagtgtggagcctgagtattgagctttgatcaaacgtgcagttgcattattagaagttttgcatagatatcttgcttttcatgcgttatgtatatatgactcgccttgggcgatcagagaattttagacctcatgacaattagagctagacccgaaacaattttatttcaacatactactccgtacatatttttagactcagctttcattcacatttaagggggaacgtatgatgaacaacatgcgataagacgcaatgaccaaaaggagcgttgagcagtttgggtggggaagtacacgatggatgcagcaaggatacagtggggtccgctattgccttccacggcggaggtagatgcgatgctctttcaaaccctaatcacatgatctgacaagctgaatgatatcacagcgtacagataccgttctgaaattacactataacaataccgagcctttacctgatacctgtatgaaagttactcaagtctcgaactgaggggcttggcagactggaatgttcgatgcaaatagagcaaacttgggtcgcacaccctcctatcctctcctagccctacccgggattgtaccacagatcgactacagtcaagtcaggtaaatttccttccctttgagtaggagaaaggcgatgaatacgatgggtatcctcattatgtttgctacactatcgcctggaaactggtactcaaccgcaaaacggtgggtaaagtgaccgaagacgacttggtcgtagcccccagtgagtactaggacggaacgttgaaggcaaatgttaaggacatattgcaaatgaaaaagaagcgaagccaacgcgttcgctctgaaggcacacctgtcaccgtgtcaacgacaaaatgttgaaggatttgagaaattctatagttctactaacattgattggaagccagtggagaaacagctacgtaagttacgtaagtagagcaatgtcctccgtatgggtaaaaagattagagttctcattaccttcaactacggccacgatgataacgatcaggcgagaccatcatcacggagagtcaagaagagaggccgcgtgtcggcaattagtcggatgctggctgagcataaagcacatattgatacggaagaagaggccaccggacggccttcaacctggagtctcgtgtatgatcgtatgcgatgtgtcattcgctcatatccactcatgtctgattggtgctgggaggatccaaaggacaagaaacattataagcttagggccccgtaccttgaacgactcattaatcatgttgacgaaggtggtagtctaaatgaccatgatgatgtccctagtgatatccgtcgagacctcattttagaaagccagacaggaaaaaaacccccaaaagggtagcgaagtgaccactggattgtcatattccccgatcagtatcaatgttctcctagcataagctgcgcatacttcgacaggcgctttattaccttccagaccagtctctcatgagagtcttatgatacctgaaactcgagagcaggctatgaggtaatactgtaattggctggaatcacgcgccaatgacgaagattacaaagctgatttccgaaaaacatgccaggtaactttggaaaatcgcctagaccttgaattgatcctcgacgaccctgatgctggcttcttcgttcagcgaggaattcaaattagaactgctcgtcgttttttgcgcgacatcaacgaattgcaccgaaacattacacatgaaccgacctctggcgagattcttgatgttgcagggtagagccaatagctgttatgttttgttatcctatgcggctagctccacataggattgactaacagcatgttatttctttgggttaaggcgtaacgtgtattgcatttggttcataatagctcacatttacatcattgccctgcaagattattatatacaggacgtcccgttcctggtgtcaccacctacactcttccattgatactaccaattgaggcacttttgatgacattagctcaatgcacaaaagtgagtggtgctgctcgtcgctgggttatatcatgccatctgtaatgattctatgcaagcttaatagaatgggcaattcaatagcaggggcagagataaagtctttgcatttgcacaacagcacaggaaaacccgaataagggaaaacctatgccaagggagataaaaaagaacagcagacattgaagcaatagaggataaagcttggtagacaaaactcgctatcaaatagacgtcggtacggtaactgccatgatatcatataccgcatttatcttggtcaagtctttcagagccactgctttgcagcctgaagatccaatagctcccactggagatcagatcttagttaacactgtattacagtgaggatacccccagccaaggtagatagatcacttacatcgtaatcccaggcaatcaccaagggttggcaaataacaagaaggttaatcgaggtcctgatgtatatgttaacataccattggaggatagtctggaacacagtcttctcttaccctctccagcattggtgagttctttcaagtcactttcttagcgaatttgacgacaacacttctcccccacttccagagggattcatcttccagacatttcttcgcaattttgcaatttgcttcgttcccatacttgtctgccatgtccatgttgctcataataaagcccatcgctttatcgatcgcacaagacttcattctctcaagttcaggtttcttgcagaagtttgtccttttctccgccgcacattgagccacaatcgcatccgctaacggctttattttcgctctgtagtttggtaatttcaaccccttcttttgcaatttgtcccatagaggtatgagtacctgcttctccagaaatggccagtcatctgctccaggactcttgcccttggaacagacaagcttatcgaagcttggccatatttctgtctccaccttggcgccaacccccttcatagtattcatgcatatctcgtgcgggagaccgatactgattgagaagccagagaatataagaagaaaaaaggaaacaaatctccactgcattatgatggttggtatgggttttggatttgaaagtaacagatgcggattgttgatatgtctgatgatgggagatcagggctttatagcaaggctttctttactacgtagagcattcaagcgcgtgagccactactggtcaattgagatgggatctacgacgtaacacaataaagaagatcccttgcagtcacaatattgtgattcaatggtagaacgctgtatgtggggaatgcgataagcctgccaggactgctcctctgcgctttgattggacctcggcgtgtgatcgggcagccgatcttatttgtagatgctcagtcaccgagaagtagcgcagggcttgcgataactagttcaccctgtcctttgtaacttcgtgatccgatcggcaggactattgatttgaacaagtagaaaagcccatccaatgaagggtctcagacagcgagcgggcgatcttgccagatcgccagatctacatggtgattccgggtggttctatgtaatattaatctactataacgatgactcacttacgacagtatacaatcatttacataaacggttctaccagaagtataagatggtgagctaaaagggagtagcgttgttcgacttattttccaggaattgagtgcgaatagtgtgaagattcaactgatttcgaagactactgtaccaagagatacttatttcagatgaactcagtagtggcgaaccctatagttagttaactatgctgcagtttccttatgagtaatacagcagggcgatcttcaagctattggcagagtgctggaccacataagtgactagggagttattacgagagatttggattcttggaaagattcaacttctgcctttctccacccactattgattttctctagcgctgcaaccaggggcaagacattgaactcaactatcacatccaggcttggcgggtcgacttggcgcagaatacccctgacatgtgtcaatgtcgcattgaattctagtttataaaaatgttaggactacctactagcgtaccctgaaatggaggtatcgaactagagtggaggttcccaagatggctcatgcaattcattagactaattgctaaggttctaatcccatgtgcgcggtgtgtgaataccccggcgcttacttagcgagtacgtcgagccatacgggccagttgtgcaggtgaccctcggggtcgtaacaaaaaagaagccaatggtcgacaaccaaatgtgacagaatgggaaggggaatctgtcgagcgacagagagattctggccatatgaacagaaatgatcaacgaaaccttggcgggctcagaaatgaatgatgaagtgtattggtcgagccgatttcgagaatgactataagtaaggcaaatcactcatgctcttctaccgttatacctgcatgccagaaatggcctccagcgctttcattcttcgcaccaacatcctgaacgcaccgccgaaggaaagcgtgaaacccccgatcgcagtcttcttcatatgttgaccaatatttcttgatatgcgccttaagttcggcaaagaattcctcgatggggttaaaatctggtgtcaagtccagtggagaccaacccgtccgcctataacccacccgtttatcgcacccagactcattaacgaaaactagatgaaacgaacgcaactttgacagtttgtgctgataaaaatctcgtaactgtggatttcgttcgcttgctctctgctatgctttctttttcgaccacccagcccggtatagtgctcgtttaatgctggatatcgaaggtatcacgttgaactcgtcgaatacgaagatagccatctcctcaacatagagaccgggtttttctgcgaggtggtcaaccagggcatctaccattacttatgtgatactcgatgggcggctgggagcaattgggggagacctggcactgccgaataaccgcatgttctttcggatgttagtaacagaacgctcgctgcatttggctacctggccatttgtgatgtggtatgtctctttttactgcataacatgtgaacaataatgtcacgctgccaggaatcgatatttcgcgccatctagattgggaggatggatgatatactgggaggggggaactcgagggagaggactgcgtgaagggaactatttttggagctgtaattaaacacgaatatacaacccactcctgttttatacgagtttggtattataccttcgatatcggaacattgttacaagtgttttggctaaccaaaataggagtaagtatcatgtgattagggttgcaaaaggcatctcatatacatccgtcatggaaggcaataacggacggcattgtatgcaatcttctatatccacgcacttctatcatattgacaccatttatttgtatcccctttctcgcgcatccaacactccctaaccacaccaccgacaaaatgatcacaagcacaattgaaatagccgcgccgcctgccaaagtgcgcgagattgtacgtagcattcccaaaggccgaattctaattccttgctcgacaagctgaccagttgtcgcgcccgcagctcctcaacttctcagcatacccggaatggcatacggaatggctcaaggggatcaccctcaaggacagcaccaagaccccgcaagaactttcctcaggagacaaaatcgaagtcaacatcgagaacttcaagttcgtcgctgaagtcaaggtgagaacaacaaacttccccaaagaaaggaaaggaagctgaagactctcaacgctcaaggagaacaccgagagcttgttttcttggcaaggcccgcccgtgtttacaattgctggtttgcataaattccatatcgagccggccaatgatggagcttcgactgttttcacgcagtctgaggatctcaagggtctccttgcattcattatgagtccgtctctgcttgggaagaaaatgcgcgcccatttcgatatcttccacagggatctgaaggcccgcgctgaatcggcataatttaggggggctggatttgttgcacacgcacaatctgccgttttatgcacgcactttcggtttgggtttgggtttgggtttgggttttgtgttatcagcgccttacctccactacattcctatgcacgacgtatacacacttgcaggcaaggtattggctcgggagatgtatatcctggtcaccgtttcaccgtctttcagggatggtagacttggaagcttaatgaaataaggataaatgaatgacttctgcgcaaaaatgaaaaacacgccttgtcagttcatctggcctgcccaatgacggcagaataagcggtctcatattaaattcgctatattgtagcaatggtctcgccgacaatggcgcgatggacttgaccggtcgtcagaccgtggtacagttgtggcacaccttggattgcagcctagggaaaccggttacacctcacacctgtggccctgggctataccgagagacgtatagcaatgtgtcacttcctcgagtatgtagaagactgacagaccgagggctgagtgaatgcccacttggcagaccaattaagctgtgtttggattgtgatgctcattatgacagtgttgccaatgaaccttttttcggtgatccaggctttttcacacaagccatgctctgcccatagaaaatgttgaataaaactgtatctcatataaactcaacgctactgctgtatggcgagaccgacattgagaggtctgataaaaccgattgatccatgagattgaagacagtgtcccaatgagaccgaaagaggtctgcactctgcggtttctctaaccacaaaacattttggatgtggacaagggtgtcactaaagttgctcagttgtagagcagcagctatatctcgtgccctgtccatgaaccaccgatgatgagtcgtgccagctgaagccaccatcccgaccgcggcaaaccagacatcaagtgagtcaaatacacgacgcgttgacgccagatgctcgaggtgctccataaatcggatgacaatcgtattcagtatgactgcatgcgagtaatatgttggtccctgagcaatgaacatgtagattatgattccgtagcgaatggattccgtcatcggtgatggcggcggtcttgttgtaacctgggcagatagtaggagtcggtgtatgacaaaacaggtgaggtcgtgaagttgtgtggatgggaaaggtatattgcgcgctcgccggaagatgttgcgtagacgacggaagacattctcaacggcatagtctacttcgatggtattgagatcaaatatttgatcgtcaagcgcggtcgagtcgaactgccattctgcaataggggggatgccatctccgatgccgaagtcatcttgtgtctcgaattgaggatgacccatgatgagcattgataccctttgcaacatgtgaatagcgattctatgggtggcaaggagttggcttaccagctaatcattctcgcggtaagcgggcttgtctgccttactgcgttgatgccgcctctcatatcgaccagctttttcaacccattaacatgcatttcgccaacttttatattgcctttgccgaactaagagccacataatcagggatttgttcgaattctaacacagtagcaaaccagggtgctgtagtgtctcacctcgatggttgccaaggtgatgactgagttcatagtcccatcttgaacagctagtgacatatattcaacttttcgtcgtagtaaagccaccgagtctgccatgagaagttcggaagtctgaaagcccttctgggccaacaactcttcgtcaagacatgctgtctgtagagagacgtggaatagtgcaggatcccctagggcaagtggccaccaagagatcagaaacggatttgaagtcgcattaaggtcaagagggtagtactggaaggcgattttgtggaggactaaatgggtaagctaagctttcctcgacaatgctcgattggcggcctacatacagctgtatatcagacgttggacgtgttcccgaggaagtctagtctgtggatacgaatcaaaaggatcaagagacccgaatctgtagttagttaaagtgccagatccatctagagcgcttgttgatgtcccattctgccacccggaagttgccggcccggtcgagggttcgtttgcataggcgcactcgacttggcgtttgacgcagcgggaacagcgcggtgtacgaagatcgcagctggactttgatttggcacacgcgtcacaggaccggcggagagattggcgcattctgaaaagatatattgtgcatccaaagggggcctgtgttcgctctaggaatagctcaagctgggccctcacaccgcttttgatctcacgattcgaatcagagttggaacggcgcaaacgtagcttgacaaaggtcggctcaatgttgaagtttccaggcgattattccgttatatgtgggacctcaggttcaggtcccgagtgcgaatcgaaaaaggactagaccccgctctacccctgcttggcatcggagtctagtcctaattgggtaatttgcataatctgtggataactatctgggcccacaagtatatcatgccattcctaagcaacactgccgtacttgttaggtgttctctgtcctttcagaagaagagccagtttgtcaacttgcccctatcatctaccatcatggactcgaatatggcttttgagatggccaacacctcaatcgcccagaatgagctgccgcagatatggccttccaaccaacctcagtcccaaagctacctgatgacctccttgatgaggttgtcagtttggcaatatgcagtgacattcctaatcgccgtattagtctatgatcaaggtaggctaagcctttgagactataagaactcgctgatgccgtctctagtgatgtatatcaaacggaaaggctctatagctggacctccactcaagattccgctcatgggcccctttatacaagctctgcatccgaagtttgaagggtatcttgcgcagtgggcaagtggaccactcagctgcgtatctgtcttccacaagtgagtgctcacgtcttcgtctcatcgaactttatcaaaccaatcaagctgtccaaactaacgcaatttattcagatttgtcgttctagcctccgatagagacatagcccacaaagtgttcaagtcgcccacatacgccgagccatgtatagtgccgatcgcaaaggatatcctaggccataaagcatgggtctttcttcagggtagagatcacaccgagtaccgcagggggttgacgcccctattcaccaatagggctatggctacatatctgccggtgcaagagaaggtgctaggcgattattttgacaaatttgtcgccgctagcaaggcgaatcaaggaaagcccaaggaattcatgaccatgtttcgcgagatcaactgtgcactttcttgccgcacttttttcggtgattatatctcccaggccgcggtcaagaagattgcagacgatttctaccttgccacagccgccctggagttagtgaacgtgcctctgtcgatgtacattccgttcaccaagccctggctcgggaagcggacagccgacgctgtccatgccgaattttcaaaatgcgcggctgcatgcaaagcaaacatggcgacaggcgcgacgcctacgtgcatcgtagaccactgggtgctccatatgatggaatccaagcgataccacgaaagaatcgccgcgggggaaacggacgccgagaagccgacgaacatgatccgcgagttcacgaatgaggaaatcggagagaccttgttcacattcctctttgcgtctcaggatgcgtcgagcagtgccacgacttggattttccaaatcctggcccagcggccggacgtgcttgataaattgcgtcaagaaaatctggacgctcgcggtggtgataagaacaagtctttcgatcttcccatgctcgagtcgctcacctacaccaacgcagtcattaaggagcttctgcgtcaccgtccacccgttatcatggttccatacctcgcgacgaagaactttcctgtcacgcccaattataccgttcccaagggcgcgatgatcatcccatcctgttatccagctttacatgatccgaatgtttaccctaatcccgataacttcgatcccgagcgttggatatccggggatgccgagtccaaaactaagaattggctagtattcggtgctggaccacacgattgcctcgccaaaaaatacgtgccgttgtcaatggctggtatgatcggaaaagcggcgctggaacttgactggaagcatcatgccacagagagatcagaggagattcgagtttttgccaccctgtttccaatggttagtactgctattgatccatctcaaggaccattccgcccgtatcttgtgctgacatttgacataggacggatgcccgctggtattcacaaaacgttcatagaggcgttgcttgcatttcctgggatggagttgagtttctgcgtcctacgctctttcgcagtggaatggtgccattcgtgaggacgtttctaggaccgtcgacctgtaaagtcgtgtttatcatgttcgtatatttgtctttcttgggccatcgtacaaatacatatttcgcataattccaaaatgtacaaaagcttctcgacttaccctgttatggattcccttccttcgagaccaggtggaggatctttttgacaagctcctgagtcccataaggtttatggatgatatcatccattccagcactgagcatttccttctgttgttcgtctctgacattcgctgtgactcccagaatgggtacatgtcctccactttccttttcaatgtcacggattgctttggtggcgcgtttgccatccatcaccggcatctgctggtccatgagaatgcagtcaaatgagtgttttttattcgcatccacagcctcttccccgttgctcgcttcaactatgttaaagcccagtgtattcaacctgcgcgagataattcgtctgttgataatgttatcctcagctaagagaatacgctggccgtcgccggttagtttcttgtgatcataacgcgatggaggcttttgacccgttctttcgatctgctcgttctctacctcgtgggctatactttgagtccaaagtgtgtctgcgtcctttgggccacctggctgtgcctcagagatgctatcttcaggggggtttgccgacatctggggttcttctgtcgtttcatccacaccgcgcattttatttcccattgtctggatatcaacacagagcttatcgattgcggaaatctcgacactatcatcttcttcgccagcttcgttggttgttctgcgtactttgaaaaagaacccgaaggtacttccgtgggatttcttggagctcacaccaatctcacccccgtgtaggtgacagagcttcctacacacattcagcccaagaccagagccaccgtagatgctctcggttttgggggtagcttggttgaaacgttcgaagaggcgtttctgagcttgctcagtgacgccaatacccgaatccttgacggcgaccatgatatatgcaacttcgccacttccccattcggaattgttagtcgcgtcttggcggagctctgattcacctgaatcgaagaagacaatatttggtgggtaggaagttggacgttcgatagaagcagccaccgaaactcggatcgatcgctgacccttcgattgcgcggtgaatttgatagcattcgagagtatgttgatgagaacttggcccattcgatctaggtctgccatgacccaatcaatgccgcatttggcataggtaacatcggtcttgtattcgaagtgtattctgtgttttcggagttcgggtcggaatatcgccatcggaatagtgaggtgtcgctgtggctggacctttcgtggcgacagcggcagcatcgacgcgtcaagttttgaaaatgtgagaacgtcattgacgattttcttttgatgcctgatgcagagactaattgtctctgttgcctcagtgatgtctatgactgagatatcacccgggttcttgttatagattgcctcttgaatatcctccgtgcaatgtactatcgcagaaagaggattgcgaatttcgtggctgatcatatcgatgaatcgctcttgttgcttcttgcgttcctgtgcctcttcggcagcgtgcttttgtaggagctctgcccttttctccggggtgatgtctgcgactgtacagatgaacacgccatcgtcgcctagcccaaagcattgtacacccttatcgtccagccgatccaaagtcatgacacaccaaaccgagtccgggtcgcgcgtgtggtattccagacgcagcggtcgtttggaggttgcaacctcccgataccctgtggacacccggtcgtagtcgtcaggatggacggagcgtaaccaacactcagagaagttgacgctggggtgtggaatgagttcacggaaccgtcgattcacggagatcagttcgtatcggtgggtgaggatggcgacgccgttcggtagaatgtcggccagctgttgcgctgagacattctgattgaaagagaaagtcatctatttcttcgcgccgaatcgcgcttcttccaatcccaatggaagatatgtcagaggctgatagaaaatgctcgatgactgctcaattatgtggtacctgcaaaagattcgggtaggcgcatggcgggtgaggctgaactgcgatttcgtcgatcttccgtctgtagattggttgtttctgtaagccagcaagccaacatatactggcttatatgagatcccttcaaatacggaagggtatgacgatttatagtgtcgtacgtcattgtccctcttcggtctacttctaatgtgggggaaagtatttcaaacgttgtgattggcagaagtgaaagtgattccactgaagtgacaccccctggatgcttggcacgtgccctgcatgctgacgtcatttaaacttcaatagttaactaaccgagccctagaaagtagttatctggctttcataagctctgcttttttcttttttatgtgggattaatgcataataatggcatgtgattttctgctcatgattttggaatatgaattatgcacagtccctattcaggttgactgcgagacatctcataattctaggaacgcgagggtacgaagaagattgaagggttgttacaaagccgggtctttgtcgtgatgcaaaaccattgaatagaatataattccagcctagtgtccaaaataaggtatgaaaaaaaaggcgaaatgtgggtgttttgagagcgccccgaggtgtaagagttatatgtcaaatgcagaaccgcgaatactataacattctattcttgcaccatgaaggctctccaacttagaatctcgtaaagcaggctatgtggggaaggaaccatgtgttgaatcgagctgttgactagggaacaaaggcattcatccacatcgggcagtaaagctaccgcgacatacatacatagataatcatgcccaatcatcaatggtcatgctgatcatgttggtcagagcttttgcttgaccagcgatcagcttggcaaagcaggagaggatgtccctattgctcacgatcggcttggcaaaagtgatccgagtgttggaggggtagttacggagtacttcgcactccgttggtaggttggaggggtggctcctttacataccatatatcaattattggccagtttgacgaattcagcaaatagaaaactttatccacagccacagtatagaaggagtgaggactgcgctcttttattagagagcgtactccgtatgcataacggagtacgaaatgcagaaactgcaaaaagcacaaatgggaagattttgaaattttcgacagtggagaatggttccccactcggagtcagaggtctagaagaccctgtgggtgatgaacgtgctgtcgcggaggaaaaattagcgtggccaatctcaatttgactacggagtagatacccgcaatggtagaaatgtaacatatttcctacaaataatacactaagtaatagctggatttatctcttttagccaggctcatatatttttagataatgccggccttggaagtagccctgaaaatatcaaagttcgctaacgagccctatcgggatcccgtgggccttagcgctcggcccgataacgtttaagtttctttttttttaagattaaaggtttcaagctgatagccactttcaacacgccattgatgcgttggctctacagaccgtgagggaaatggaatggtcacacggcatatgcattgcgttatcaaagccacattttaatcataatagtcgtacactatctcgcatgtgcgagtgatagggccagttattcttcctctccacacctcgtgggtcttcctatcttaaagaggtaacccgagagaacacgctccattctaagatcttacttgaaaaggtaatccgaagggcctcactccactttttaaactggatcgattgaagattttgatttttagtttgatagtaaatcctatattagtatgaaagtaggtgccagtactaccctcgctattcgtttccatcttcattccatcttcgcaatcacaatgggcattgttgactatctcacccaaccgcgtgtccatcaggtacatggtggtgatgaaacacccaccatggaagtcccaaaagtaatcgagcccaatataatctctagtccggacttttcaggcgctgttacacctgcgcacattctcccttccccagctggtagcaaggatcctcttatttttgagaagatcccgcatcagtttggccgtctgggttcttggagagggtgtttgattttgtttgttacctccggctctcagtttctcgacaatgtcttcatgacaagcgccaacattgccctgtcggcaattcagcaggatttcggcgtgtctagtactgatttgcaatggatgatctctgcatacaccttgtcgtttggtggcttccttttgttggccggtgctttgtctgatcggtatgacttcctcttattgtctctaaacttgacatcatgctaacctgcacagttatggacgaaagaagatactctgtctgggtcttgcctggctttctgtgtggaccctagctattggatttgggcagtcgtttattcaacttacggtgttccgtggcatccaaggaattggagctgcgatgactgtgccatccgccattgggatcatcagctcctactttagtggggttgatcgcacccgagcactatcaatctatggagcctcgggaaccctggggttctgtaccggtcttatatttggcggtttcttgacctcttcgttgggctggagatatatcttctatctgattgtcatcatcactgggtccttgggaatcatgggctttatcgtcctcccaagcgatgttgcttccgaaaagaagcaagaaagaatggactacattggtgcagtgatatctacagctggcctgatcctgctccagttcgtcttgtccagtggtggaacctacggttgggaccagccgttcattattgtgctgctgatcttggcggttggtcttctcgttggcttcgcaatccttgagaaatacgtcagtaacccaatcatgccgctttctttgtggaagattcgcaatttcgccggtctctgggttattggtttcagtaagttgcctgtttttcggattcgtgcttcggacaaggctaattataaatagctggctatggcacctaccaaaacgttattttctatatcgtccttatggcacagaaagtggacaaactttctgctggtgacaccgcccttcgcttcttgcccatgggagccattggcttcattgcttctcttggaacaggaaaactccttgaatacatgaatggaaaacacctcctcattgtcggattggttctggctgtggtcgcccccgtctcgagtgctttgacttccaaccctgaagcaggcttgtatgtatcgctatttctttcttggataaaactatactaactctcacagttggctcaatgttcttcccacatcccttatcagtatctcatccgtatcttttgtcttcgtcacgacgagcactgtggtactcacaagtgtaccggttgaagtcaagagtcttgctggtggaatggtgagtttttgttccctgcattccaaccgtttacactaacatcttaactagcttaatactgcattccaaattggatctggtgttgcgttggctatctcggcagctgttaccgatgccgtcgacatccagcaaggacacagtctcgcagagcagtatgctaccggcctatggtgctctgtcggtctagccgggcttggactgatagttggtgttcttgctgttcgacacaaaggcattggaccgaaagatagattgggcgcaggcccagttgctatgtaactccgtgtgatgactttttctcggcttttcttatatagatgataggtagactttttctttaatcatgatggatatagcgtttagttagtatgacgagggaaatgggataaatctataatagttggcgtttgttcacaatatcaaaagttttcacacttaggtagttctcagtaccgaggagcgaaccaaatacgagggaatagcaaatgtcacggctcgtacccctctgagctttcagacgtaccttcctaatcgggtaactaccgctttgatattaaggttgcctcacacctacaccgccttccaattttatgtaccatttttgtatgtcaaactccccatacaacagtggcaagacagtaggaacctgcaatttgtatgtaaattactgacagaattaagtcacttttttcatattaaccactttatcgtcaagtgcttcatcgttaaggggctaaatcctatacaaagtgggtagaatatacgcttttccgatcaaaatgcaatttcttttcctatgtaaaccagaagtgggcagtactttttgattgtatcgaattaggaagacggtaaacaaaatttagccagggtcgtatcaatcccttcctcaaccgttgtgccagatgtgccctcatcttttgtccgatggaacggattcgtcaacaacacttcggaggcgcttaagtagtcttggcctgcaagtaatataggtaacaaattaacacaagtcaattgtaaatagccttcgaaccttggaagctacaatttaaggccttataataaggcaacgaacgcctcgaactcacatagtcacgtgtataccaggtcggccgcatttggaccaggtcgcgatgcattcatagcaagctgttctcggccggcattcgaggaatgtaagagaaaaaaaattttaccgcaatgtaattttgggttgccttggactttagtcctcccaaggtggtgaacgacttgattagcatcaatcctcattgttgttagcgctgctcaccatgatcgccaggagaaaggtccttcaaatggccgcagtggcggccattacaacttatatcctctgcacggtatttgtccgaagctttggagatagagaatggcccacctcgctttccaaactctctcagaactccatgggcgataatgttttcgaacacatacaaaacagcactcttggagttagttcttgcctaccgtctgacggaattcattgctgacttgaatattaatttccagtttgagcatatctacgcgatcagtatgaaagagcggaccgacaagcgcgatttcctcacactagcagcctcgatatcggggttcaaggtggaatggctcgagggagtgcgacccgatgatctacatcctaaggccatgcctgacgtatgctctccagttcaataaaccccagacaatattctcattctttctcagggactcgacacctcacccgtgaagctcaccgccgtggcatgttggcgtgcgcacatgaatgcattggtcaagtacagtcacaacttattctcatttttcagaggctatgctgacgattggacatttaaaaaatagtgtgataagcaatgactactcaaccgctttgattttggaggatgacgcagactgggacgtgagtctcaagtcccagctcggtgaatttgcgcgcgggctgcacgccttaaaagggaccaatcaggtatccaaagaagctccttacggaacagattgggatctcctttggatcggcggatgtgcctcgggcccgaacgccaacgaaacaagcttctacgctatacccatggaccccacagttccgagggtccaccaccgagccacctggggcggacccaccgaaaactggaagcaacaatatccagaattggccgaggactcgacgcgatttatctatcgggctgaaatgggctgctgcatgtttggatatgcagttacaaccaagggcgctaggaacattctttccgctctttccattgatcatttggataagccggtagatgatgccctgagtgaattgtgcgcgggtgctaatgggcgccgcaagattgaatgctgggctccgttccccaatttgattggtacgtatagaaaggctggatcggctgcccgggattcagatatcgagagcaacaacgcggctgaattccacgaagagctggcctggaatatggtatacagcaccaggcgtaatatccaccaattagttgctagcgaggaaattgtttactcacaatggaaggatgaagatgtgccatggtcgagtaaagagattaagcataaggagtttgtttatcctggtggatatcttgtcaattaatcttagctcaaatttccgaatgctagttacaattctaccgcaaacattttcgcacaacccacacccaaatatacatctccgtccggagaatttcgcggagggactgtatatatacctcggcattatacctttgttctttcctagggttaaaccttgttaaagcttgatagtgagagtgttggatcaaatttggtttgttagatcttggctttgagttatttaaaacccccttgcttcgtaaaggagttgcggcaaaaattgtatagtttcgattttcataaacgaatgagaggccacggtactgtatagtaattgtagccaattgtgtagtatcattccatacggaattcctcagcccttggcatttgggattaagtttcgggcttttatgctctatctctttctcataggcagagcttaggaaattggcttagggtcggcccgagtgggtttccatcggaatattattgtgagggttaattatcttattgatatcttatttatgtgaataccccaagtggacttgcaatatatgttctccatgagtgatactcaacagctaattgtagcttcaagtgcaacttgcgaatcaatgaccatggactctgtacggtatagctcatcaaaaaatattcagcgtgttgagttggagatgcctagacactcaactcatgggggagacttccccttgcgtcggctcttaggtaccatttacgccagactttggggtgtcttcagcaatcctactatggctttcacctctcctattactctccctttctgtgcattcttgagccctgtcacaagggccttccccgttatgtcttcctctcctcttccaaatatcgtcggcctggccactagaagcccttggctctagagccagccggaagaatgagtccaatagccttgcatgttctcttctagatcatgtggcttaaatgtcctaattgggctcagtggcaatgagaagataatgcaccaaagaatggaatgcctagagcgtgatactaaggagccaaaataagcgggcctcgactgtcctcgttttccttaaatctcgaggatttcaccgagttgacagcggctgatatatccatctgacttgtacagaaatcttcgacgatccgttgatcacgatcctaatcccgccgatccattataactatacagtcctacacatgccacgcttccttggcctttggggcaatagcctcaatatagctgccattttgggggtgctcatgccggggatcctcacagtaggctacaatgcatcactactcgggggtgtgttgacactgaagaacttcgaagaacagttccccgaaatcaacattgccgctgctgttgataaaccacatgcgtcaacaatccaaggcattgttgtagcctcttacacaataggaggcttcttcgggactctctcctgtatatggctaggtgacagatttggccgccgacgcacgataatggcaggatcagtcgtccaagtcgttggagctgttttgatggcttgttcaggctctctcattcaactcatcacgtctcggatcatcctcggtgtaggcactggtgctctactagccacaatccctctttggcaatcggagatctcgcctgccaacaagcgtggtgctcacgtcggcatgaaggggatattcagcggttttgggtgtgccctggccctttttctcgactttggaatgtcattcactcaaggcagtgttgcctggagatttcctttcgcttttgtggtgctactttccatcgctgttctagtgttcatctacctgttacctgaatctcctcggtggcttatccgacaaggccgactatccgaagctagtgaagtcctggcagctctcgaagacacatgtgtcgacgatcaagccgtggaagcaaaaatcaaagaagtccaaatatcactggacttgtttgaggaaaagtcactggggcaaatattccacatgggccctcaaagaacattccaccgagctatgattgctgctttggcaatgttgttcttgcaactcaccggctctacggtcatcaccttttacagtacgtatcccgaattatctatcgccatttatacaatatattgacccattctgcacattttcagcaaccgcaatcttcgaaaacaatctttccctcaataactcaacatccacggtcctggcagcggtctaccagctagttggccccatgggcggagccttctgcgttttcaaaattgacagactcggccgccgtgtgttgcttttaggcagtgcaatcggaaatgttgtctgtctggctttagtagctggcctcggaacccaagccgataaccctctcgccatgcgcggtgctgttttcttcattttcctgtttcatttcagctatatcatcggatttggcgcaataccatatctctacgccgcggagattgcgcctttgcatctacgcacaactatcaacagttttagcatcagcatatcctgggcggttagcatcttactcactgtcgtcactcccattgcattcaacagtatgggacagacatactttgtcattttcgcgggctgcaatgcaatgatgatacctgttatctattacctgtttcctgagaccgccgggcgcagtctggaggaaatggataggatcttcgctctttcgcgaggtcctttggatgctgtcaaggttgcccggcttcttcaacagggacaatcatttgacttgtcgcttgaaaaggaacttgactcaagcttcaagtgcccggagcttcagcttcgcgaggtatattcggcttgatatttacattcttatgactaagtccaacatttctattcgcgggaaataatagtctacacatggaaagcctcaaggaagcttcaaggtcctatgattcctccgcccagatgccattattttacctggactgataccagacgggagaggtgttaagtcaaagaagataacaaatatacgggtatgtacatactgattaccgagtacgccagtagatgtgtagacgaacatgcatgaagaccaaaacgtaacaacctggaaaactttgaataacaacaaatcaaatctcgggtcagaaatcacaagcaatagatgacagatacaggtaagaatttccatcatgttttgcccctttttttgggttcctttttggcttctttctttgctttgatctctggcttggtcttttctgcagctttgatattttcagcttgcatcttttcttcagcttggatcttttcttcagccttaatcttctcagcttggatctcttcttcagcttgggccttttcttcagccttgatcttttcggcttggatcttttcttcaatttggatctcgtctctaatctctctttcggctcgcaaggtgattgccaatagaatcgcccctatctccttcatatcggatttcttcgttatatcccatggaccgtactggttcatgatcaagaacgacgaagtgtcatccggatatgcagctttcttatcgcttagatattcgagatactcttcctcatacttcgcaaccgtcacccatagctcatgcctgtcttgcgctatgtgtaagcgcctattaatatgttagcatattcgtagttgacccaagaaaggataaatacatacaggttgttggtacgctgggccaagtcgtcatcgcttttgatccaagcgaccatttgggcgctctcctgcatccgaataggtaccatatttagctttcttgtgacgggtttcacctcaatgatcgctctggtcttcccgccagggctatcgagatagccatccgtccttgcttcaaactgtgcgttttcaaaggtagcgataaatggctttctgtgcaaggtccaattcgagtagaaatcaaagtgcatggtaagagcattgagaaatacgatgagcgccgtattgacaatttgttcatccctcgtggggggatataaaattctgtccatttcccgtgagattgtgtttggcgggctggggtcggaactagggcttgagccagggctctcatcatcttccggcttaaagatccgactatgaaatgggggcgaggtcttattatcgaagtcataagatatgtctccagatggcttgcgcgattctcttgatggagtctgaggatcctccaaagtcattcctttcattcctctaactagcggaggatttgtttttgcacgggttcgggacgcgataggcgtgtcaaatgtttcagggtcggcttggggtttggtcttttcaacctcctgatggtagtatttgacaatggcaaagtttccctccggtcttgctcttgagggctctcctgagcgctctgttatgtgcggttctgggatcccaagaccatcacagaatgtggaccacgactgataagagcgaagctttttctcggcctctcttatccaatatttgatgtccggtacattggttatgtttcttttgtgcgtctcccatatcactcggaggagtaagaattggtcaaagcccattttggaagcagaagcaagctctttgtcgtgaagttttgctttcttaaggtcacgagaggttaccttgtcgcaccactcctgaaaggttttgggtatttcatccctctcggaagcaagcattgtgttattgaagagaattcaaacagataggcaatattttctagaatgaatgttgtcactgcgtaggaatgatttacaaaatggggataacaatgctctttttatgctgggggggctccttcaattgagaatcacatgctttagtaaggctaattattggtgataatttgatttctaattattaggtatggtagatttttctttcctttgtctttttgtggcgaagcatgcatgtagggcgagtaatggttggatgaggagcaattagttgtgatagtggctgttttggtcatccgagcgatgcatggtatctttagtatacgaagtcgacagttggccattggttaagagagggtctttgttcccaatgaggcaggagctgtagacactaagattagaatagaaggctgctgctgcttatgccgtgtcgttcggtagtctgttcggtgatcttcttgggtatctcctttttaggtacacggaaaaggcgggaaagggtttaaattatagaaacgacctttctgtgtagttataaaagttagattagaatgaacttgaccctttccatgtccgagacaaagaaagtgaagttggtacgttggtacgttggccctggtcttggcgctttggtcgctcggcaactcgcctcatcacatttccccccatcagtgaactctccgccttttcttctctcacctcccactacaacatattgattgtagttactcctatccaagctatacatcatcttcaaatccctcatacgaaacatgacttccgtggaaacacgtgatcatcagctcgaccgctggcttctgatgaaaatcgagcatgcaatcgagaaccttgaggagcataagctcaacaacacagaacttaagaaatggaacattcgcttctccagcatgactcttgatcagaactcagacctcaagccccgcttcttcgcaccgaaacctaacctcccgctaccaaacgatgagatactcgatgaggccgctgaacctgatagtggtgatgatgactattatgcggctgcatacggcatgaatactttcttagattcttatgccttcagccaagtaggcctctggaatgacgggccgtggcgttcgatggagtaagtctaccgctatttggaaattagagttatgtcgctctgtctatttatgatatctaacgctagtcaatagctgtggtcgatacagtacttataagagcctttggttctatggtactccatcacttggcccgtctcccgcatttggcgctttaacaatgatagatagtcctgggaaagaatatccacattttaaagcagttatatataccgacatggaggcggatgacaaaacttgtttccgttcagaggtcttgatcagccttcgcctaatgttggcccaattgagaaaggtgcgcctgatgcaccataagatcgcaccggtaattatcgattcttccctttctcctattcctttattctatctttcggcgttactaactaattattctataggttttgcttatctcgttgacggggaagtatgtacgggtattagagtcctattttgatggcgaattgcttcaaattcgctctacctgtctgtacaaattctccgaccgtgactcgatatcgacattgtacatgatgctcgccgggtatatgctcggccctcccatcggagatacctcttctttcccttgagttagtttggatcgggcaaggtgtcacggcttggagtttggttgtatgttattggatattgaaattggtgaagtttgtctttggcgctactgccgcatttcatgcagtgatgtgcttggtacttttcataaaacaggttgataagttgaaactctatggcagatctcatttttaagatgttgcaccgagtaaacccttacattacccacgatcctctaatatgtttgaattggatctcatggtcagcgcatataaagttcggcttcccacatacttctgtctttccgcttggcgtatcatgacggcaggatgagtggagtagtggagtagtggaggttatcagtgtgatagtaatccaaaagtgggggttcgatgatttatgatattcgagagctcaaggatgatatattctgtactgtcaatggctgaaatttattaatttccaagtttccaacagactctcaattacatcagagtctcgacatagcgatatacaaaaatgaaggatgggtatttgctatagcgattgaagccagctatgtatatatccacataacagcgtacataatagagcgtgccgttcaataggcatcatcgatatgcacatgggataattcgtagttatataattgactactttgtaagattccgacaaagatgcatgtgcccgcatctacagggaaacctaagaccaacgtcttctccaagagtgggatacacactatcttcattcttctttgctccatctcgcctactgaaactccattttatcaatcgatcatgcctttgcccgagtcctgtattgggaaacgaaggcgaaatagaaacgcctcaggcaaaccaaaaccaagcaaagcgcgatcctgcgaggcttgtcggcgcttgaaaacgcgatgcgaaaccggcaactcggaccgatgtcatcgttgtgatgttctcaggtagggaaccaggtttgataatgtgggttaccaagctcttacatctaactatcttcagggttaggtgctctttccaggccatttcccgcagtcacccggaactgatgctggaggcggaggtggattctgcgacaagcggcgacgactaccattcgcggtatgccctcctcccgtgctgggctttttaagacttggtcgatgtactgatgaacaataggctttgtgcggtggaaaacaccttgagtcaacttcaagcatcactatctgtccacagtgatgctgactgccggactagaccaggggtaaattccagttacctaaagtatatactggcaatacatttaattgaatactctaggctccatcaactattgaacgaactgcacgcgatgcacccatgaatcttatccaagagatccgacagaatatcacattacatgaacaaccatcgaccagcgatgatagcactgaagatattatcatcaacggtatagtttccgaggaacttgctatcgtgcttctgaaagggtgagcatgcgggacgttctcgtagaacatatcccaatgttaactttccagattctcgaaattatccaaccgctggttattcatgagtacagaccccgtccagctacgcaccaaatcgccgctcctgtttggtacctgtattttggcaggtctccatatcaccccctccttgtatgggtcatcaacacatcaagctttgtatcgccatattcacggactgctgggccaggcacatctttcttccactgcctcgctcgacacaatacaatctatgttgattttctccatgtgggacctgcgcccaactttgggccctgatcacggtacctcgtggcttctcagtggcacggcggctatgcgggtgatcatgactacttcgtttgggcagcttctaaagacaagcgacgccgatagaagcgaacgagccagagcacaagaaataatgcgcacgtggaacttgatttgcctctgtcagttacagtgcgttacaatgaccaagtctcgatccttccaatgtctatatcatctaacactaatcttagattttccgtgggctctggtcgtccaccgattatatccagccagtactttgacgaatgtaccaacgttctcgattttccgtcatacaatgcacgcgacgagcttgtattggctggagtcaggttataccgactcctttgggaaatcctaagctcaaacgtgatacaaaggggaagtgctgtttggcctgaaatcgacaacttgcgaatgacccaggagaatatttacagtgagcaagaaatatacaatcgccgcattgaataagcactaattcctattttatagagcttgattcctcgcaaccattacggtttgcatacgcctgcacgtacctgattctggcacgtcgcacactccaacatacgagcgaaactcaacctgaaggaatgaccaactccaggataacacaagaggaaccaacgctcccgttaattcggttcgcgattagccagtcgcttcaactcttgaatttatttgtctccatgtcggatttgaccacttatatccatcctgcttacgagaatgtgctttgttcctttgcaatggtgacactagctgagtttttggtccatttagaggacgtgggaagtataattgttctcatggaacaggccgtctctcatattcaatgtggaggcaaagccgagccggtgagccggtggtctctgaacatcatgaagcaacatgtcgcagataggattgagcaagaagattgtgtgacttcgacgggagagaatggcacagggatttatatgccgcagtcagttcaaaatgctactgagccctgggtttgcaacgaatggggcatcgagcaggagttcccatcacttgaagacatgttcttcggtaatgtgatttgaactgaggaataaataagggattgttaatttatcctcccgcgcctgagtcttcaggtgcacatccctgttttacctgacgcctagttactttcatctactgcgctctataccgccttcgaattttatacaccgctttcgtgacaatagacctacaatttgtacggcgtatgtaaattaacaaagttaagtcacttcaactgcactaactgcttcatccatcaaggagctgagtcctatagtaatcgggtagaatatacgattttttccgatcaaaatgcacgtttcttcactatgtaaaccagaagttggcagaatatatggtcttacctaatatggaaggcggtactgaaaactcaggcggtcaaattagcaatccccaataaatattggctcccccattgtgaacatcaaccatttactcatatcagttccatatatacattcaaaatgcggaaatcaactgcgctctctcaatctgagacctgcctggcactccttgggctttttcgagaatccttcgtgtgattccatgattggctggtacaacgcgaactcatatcgatgaaacaaagttccaataattagctgcagctccatgatggcgacgttctgtccgacacatgcccgggggccatatgagaatgggttgaatgcagttttctgtcgggcagtcaggttcaaccagcggtcaggcttgaattcctcgacatcgtctccccaaatatccttcatatgatggatagtataggagggcaccgaaagtactgttccaggagggaagtggaacccatcaaaatccacacccgggctatgatcggcgaccaaacgtggcaggccaatagccgaggtagaatgaagtcgcatcgcttcatcaatgcatcttcgcaggaacgggagatccttgatctgagaataagatgcgatctttgcttcggggtctattgcgtggtccagctcttcttgtaatcggggaactatcgtgcccggtgcactgcgttctccatgcaggatccagtaaaagatcccgcacgccgtgttggatattgtgtcagagccagcgataagctgcgtcagagcctctgctatcagctcatcccgctccattggcattccattcgcatcttttgcttgtagcaagcgcgacagaatatcgttgcgcgagtcgaccattcccttctccgcggcatccagtcgtgatgcgacagcggcgacagcaatccccgtcaggttctccacggccgctacgcccttggtgaaaaatgggtctgggaggtaccgagcccatgggcgcagtgctggaagaaggcccaatgtcgaagatatctcgcctcgtctattcaacacgtcgactgccggggtgtatgaaatgggtcctccggtcacgagctgcgtctcggtctcatctttgcccttgtttaccattccaaatggtgaaccgaatgccagatctccgattatgtcgaaagcaaggtagctgaaccagggcattgcgttgtatcgagcaaattccttcccgttgcgttgtggctgggaagccgcgatccggtccagctgggttgtccagcgctgtaggttttccgccatgaatggctcaaactcagcgactgacctgggagagaaagcatgggatataatcttccgcttgcgtgtgtgttcggcgcggtcgcgaacattgaacatgcccggggttcgcgccacgaatgcttcataatagtgactaaaggtgtttcgttaacactagtaattttcaatatagggaagaaatgtgagttactccttgaggaagccatttccgtgcccgtaaacaatattcaatgcccgttcgtcggcgatagacacatggttgaaaccaatacggacgacattgccgtgttttcgatgcgccgcgtcgactgctgcatatttccggccatgtttggcacttaatccgacccatatgttgctaaatttagcaacaaaaggaccagggacttgacttaagtgtccatatgaaactaaataggggtatatgtagtagaccgcgaaccacacggggatagccacagccatagcccatggcgagagcaaaagggatagaagagccatttgataaacagagatgaatgaattgatagactagagattatgccattctcttcctcttttttaaatggaatcagttgcactcgacatttcacatgttcgctatctgtccgacggagtacaaccaacaccgtcggagacgagagaaccgatatgcagaatcgatgtacaaggaccaaagaacctgcagatagataattgaccccgcaacattggaaaagtaaagatagagaattggaatgcagtttattggttaattttggacagctctgaggttgttcctcgaatgtccgcggtgataagcggccataacgcggcattttcatttcccgaaacctccgctctcacgggcttttccctgtcaaacgcttccaaacatattgaaattccccatggagtctcagtcccgttggcgtcgaaggccagctcggtcttgcattgagtgtctccgtcgcaaaatccgctgtggccgaatgacccctgtacgcgttgtgtctccgtccacgcacaatgtacctacaagctttatggcgatcaacacaagtcccccttgtagtctctagagagcacctcaagacaaccaacactgggtacttccgcaccttcaccgtgacatgctcaacccttcagagatgatcccccgtcatctagtagccagccattagagcctcgcaccactggggtagggacaccaacaccaacaggaacaccacattatagttcggcttttcctggtcaggttgatgaacacccaaggcaagcacaagccacaaactcagctattgcagatcttttgcaacgggtccagggcctggaacagtcggcacaaaagcctgtgcatggcttgtgttgctgctgtcggttctggaatcaccgtcgaatcccctgcttggccttgaactcccgtctcgcaagatctcagatattttggtgaccttgtatttgaaatccttcgagtcaacacaccgcatacttcatataccttccttttgggttgactaccagagatattggaatgatccgcagaatgcctcaaatgagctacgccttacagttcttctcattattgacatagggtcaagcctgcacaaggaggaaaatacagatatcggattccgaaaaatggttcatcgatgggtacatgctgcgcaagcatggctttctgggacactagaaaaagaccgactgagtgtttccgcgctgcaaattgactgtcacaatcgtcgagcgttttccttcccttcgcgcttcggggctccagattgatcttcgaagccatggaattgaagtcatgaagcgcatgggtctcgaagatgccttcaaggcacattcaattccagagcggggcatggaagtggtcaacaaagcgggcaaacggcaggctttctttccagcaaacgattctataaatcccagtctaggctttagtaccaagtacgaaatcatgagaggcgatctgtgtcgaatcatctatgatctgagcaaaagccgggccaagtatatcttcggcacgtcaattgagagctacgaggataacgacaaggaaaagaccatcaacgtgcgatttgcaaatgccaccgaggacacattcgacctcgtgattggcgccgatggccaagggtcacgcacacgaaagatgatgctcggaagggaagcccccgatgcattccgtcccctcaacggtcgctacatcggatatttcacctttcctcaaccaatcaaagagggggaagggtatgtcgctaccatgtactcggcaccgggcggacgaggtatcatgcttcgaagacacaatgcgcaagagattcaagcatacctcggcggccaaacgaattcagagcagctcaaggaacatttgcggggtgatgttgcggagcaaaaggaggcgttgaaggagatgattcaaggggcggggtggagagcggacgagatcttgggatatcttaaagactctaaaaacttctactgtgagcgtcttggtatggtcaagatgcctcattggtctcgcggtcgtgtcgcgctcgtcggggacgctgcttattgtccatcagtcatgacaggcatgggtaccacttctgggattgttggggcctatgtcttggctggggagattggtcggcactgtggtgaacctgctgagaagggtaatggttctcttatggctgcgattcaggcatatgaacagacattccgcccttttgtcaaccaggtgcaggcaggtgttgccgaggatgaggggctttgggataagatttcaggcaccgcttttggcattgcacttggaaactatcttatgggagcttcttcccttttgagattggatgttctcagcaaggtctctacggatcctgtcaaaaactggaaacttccgacatacaaagagttgctccgagattagacaacaccaactgtgcaattgtgcaaccttcgaactcttctcttatatctacctgtatttttcctctcaatggcatggttatttgttttatttgcagtacatcagaccatggcttttctttacatataagcgaatctatagcctccagattaattatcagtggttcaaattcagcctgctagagatcttgcaataactctccaatttaatcaactactcaagctattgattggcacacggtgaggagtccatgttttgtttttatttactatgtcggcctcaagcagccagtaacaatacgtttttcctatctgggctagcttggtctctgaaccctggaacctcggaacttaaagcagattacgtaattacgcggggcttgcccgccctacagggcttcatttgtacgagcgatgtgatgggctcctcaattacttgtgctccagttgtcgggatttggcatagattattgccaacacaccatcttcctgcacataaccataacagatcaagcacttgctcactcactatgccgagccagaatacaagctggagacaggaagaacactaaacaaacagatatcatatttgaacaaggtacagagaacccaatctcacctgaagaaaaaaatctcaccccataagcgacctgcagagcaggagatgttcttcacgagctaaactcccgaatcaattacgtacaatctcgggatttggaggtcgcaatttgcattagcagtcttgggagacagggtgcttatcctgtataagcctagcggatgtcattgtctcattgttcctgcggcttggcccgacacggcctacttagttggcgtacttttgcctgcagaatatattagaaccgtgtctagcgacaggaatcttgcaatcagtagtctctccccacgtctttgtcaatattattgctaacatggtttcgacttggctccactgcactccacatctcgacagacgatgtacccttcataagggtaggctgtcatgttgtcgagagggttgctccgctctggaggtccgaccgttcggttgattttaactcttttgatcttatctgatccgcctttcttcgtcttggtttttctttttctcgtggatgtttgtatttattaggctgcaatacacacacctacgccagtctgatatatacctcgccaaatcatggataaattacccaacgcaatggccaccgaggccctcccgaaagaccaggacctggccgaccctgagctacaaggaatcttagaagggaccgcccgattccgtcgtctaggctggaaacgactcactgtcatttcgatagtcgaggccatcgccctgggaagcctaggattaccgtctgccttcgccgctctcggaatggtcgcaggcgtgatcctaaccatcggactcggcttcgttgccatctacgcaggctacagcatcggcgaagtcaaactacggtatccacaagtcggtcattacgcagacgtcggccaccttctgctggggaacgtgggatcaaagatcttcgtaggcagcttcgttgctcttctcatcttcgtgattgggtcgcactgcctgaccggcgccatcgcattccagaccatcacgcaaagcagctcgtgctcgattatcttcagcgtggcatctgctgcaatcctgatgctgctcgctattccgccgtcgtttgccgagattgcgattctggggtatattgactttgcgtcgattctcgtggctattggcgttacgatgattgcgactgggatccagagctcgaatggatccggtggctttgctgctgcggatgtttctgcgtggtctgcttggccgaagccgggtcttactttctctgcggctatcgtggccactaataatattgtttttgcgtattcttttgctggctgtctgccgtcgttcatggaggatatgcatacccctgaggattatgtcaagacgctgtggtggctaggcggtattcagattgttatctataccctgactgggtctatcatctatgcttttgtcgggcaggaggtgcaatcgcctgcgttgctgtcggcgggccctgttgtctcgagggttgtcttcggtatagcgcttccggtcatcttcatttcggggtcgatcaatacgacagttgtatgtcgatatatccatggaaaggtgtaccgggactcggctgttcgcttcgtcaacacgtcgaaggggtggagtacatggcttggtcttgtgttctgtgttaccatcctggcctggattattgctgaggctatccccatcttttctgaattgctctctattatttctgccctgtttgtgtctggtctgtcgttctatatcccaccaatcatgtggtatatgctactgaaagagggtgcatggtatgagaagcacaatttgaagcctgcgattctgaatggtgtggtattcctcgtgggcatgattatttttggatgtggtacctattctagcgtcactgaactggtaagcccttttccttttaccatccgagcaagattactgactatgttttagattgataaattccggtcggggtcagtaagtaagccatttacctgctcttgaaatgtcgcaataacgcggtgatgtcccggcctgccgaaatctgtttatataaaagttccatgcaaatatatgactatcgttccatccatatacctacagcgatatctttctacttcatctaagtcttgtttgtgcgtagcgtcaaagaatagtagtttaaatatagctaaatacaacataaaaaacacaataaaaagtccatggtgtctaccgcgtttacttatacttacctcgttccctcattactcctttcaaccccatccatcggatctccaacccagtggttcccctcaaagaacgcctgtaaagcaccaccactatcacccaccagtccttcttcattaaacatctcagtatccaaaacgccaagcataggatcgccaacatcccccaggagttgttccccagcgggagcagatacaggtacaggtacagccgcagggacaggagcaggagcaagggcaagggtagggagagggacaggggcacgggtaggagcaggggtgtagttagtatcagagaactcagggcccgccgaatcaatgtcatcgtccgattcacgagcagagtcagtgccagtcgcggacgtcacggccgtcttgcgtgttctcgttatccttcttttgcgggttactggggcattcgtcgcagcctcattttctgctccggtttccgcttcggtatttgctcctgcgcctgcgcctgcgcctgcttccgcctccgcctccgccctcttccgtttcgtcttggcgtgtctttcggccgcgtatcgggctacctgttcagaacggcggttatgcgcaatcgcgttactacccattttctcggttggacgagccaatgctggctgtttaggggttagggcaccacctgtagaagaatagaaatattagcatgtgatctttcttccaatcaaaaaccaaaccaaactagaaggctaactaagccatacctttaataacaccagtccgaataataatcgtcatattaggcctaggcaacggcgagcgcctatcaccccgaaacggatccggagacgggttccgcagtctaggccaatactcgcgaatagtccgcacaatcgtagatgcgaaattcaacgcggccatccgcacctcgccaatctgtgggttagcaacgttcgcaggatcgatttggtctagggagagatggcttagccagattgtttccctgtctcgtagatagccttcccgcgtgaggttctgtttgaagagctcgaattggatgttcgcgatgttgatccagtctccgtctgggcaggtatcttgtggatttactttgtcggttaggaagtcgcttactcgcattgcgagtggcatgtcagggtggtctgcgcggattatctgcacgtcgccgttggggactatgtacggccggccgtagtcgaatttgttttgtcggtctgggtttctttgggcggaccttgctggctgttgcggttgctgctctgctggtggctgttctggttggggtgatgattgctgtgctagttgatgtgctagttctccttctagttgctcttctacctgctgttcagatacctcgatggaatgctgtacggacttggatactcccctctgcacgggctgtgctgcggtcttctctccccctgtctgttctgccagtggattctgccgtctgtcaaattccgtctgcaactcgtcttggatgcaattcaggtatttatacagcgctccgcatagaagagtgtggtccgttacgtgggctagagtagcggctggtaatctcggcagtcgcttgcgccactcaattagcattttatcgcgcgacgcacttgaccggaaaacgttgacgaggactcggccattgttcagagcgtcgagcgcgacgatgtcgtagacttcttgtgctagatcgtggaggagctgttggtcggtggggctgtatagtatgtcaagacgcttgaatacgtatttgtcgtcgaagttgtgtggccaacgactgagcggctgcggctgtggaggcattttgttagctttgaatgatgtattcgaatggtctggaatggagggtcatggaggattctgttcactatttaatactcgagaggctttgtgactgcattgtggccttggatctcgatattccaatatgcattgtatctgaaagagacaaaggaacaaagaagacgtgatagagactaaattaggtcaaagaatactctatcgaggtgaggtttcaaggtcaacactattattacgcaaataatgagatatctagtctcgatatttttagattgttagatctaactatgaggtattgtggcggccggggggggccttctccacccccccccnnnnnnnnnnnnnnnnnnnnnnnnnnnnnnnnnnnnnnnnnnnnnnnnnnnnnnnnnnnnnnnnnnnnnnnnnnnnnnnnnnnnnnnnnnnnnnnnnnnnnnnnnnnnnnnnnnnnnnnnttgggggcggctggtgggcccattcccaccccgccacgttcaggatggcgagatttgatcatttccaaactcgaatgattctagacccgagaatacagacagttacgattacagagagaggtttgaaagaaatgacgtggatatttgcattgataactccttataaaatatgaacacaaaattcataggtatgaccttccaggcgaccaatcgccagaatccatagaagaaacgaaatagcaattgctcacatacccttcctccgcgtattttcgtgattcatttttgaaattttcgtcaagcaagaaatcttacgagacgtaagccttgccagccaggttgagagtgctgccgctgagcaagtagttctcagcgcacatgaagtaagagtaacgagtgacagcagactgctcatccaaccaagggatcacctcgttgaggaaagcagcagtagcagagggatcggcagagccattgacatcagcgttgagagcaaactcggtgatccagagctcggacaggttgttgctggaagcagcactggcggccttggtgacaaaggacttgaaatcgtcggcagtgtcaccgtaccagtgaacggccaaaccggtgataccacagctggagcagctaccgatgaaagactcaaaccagtcaagacccaatccggcggtagtggaggaggtgacggcgggcgagatcagcttcgcctggccagaccacggggtgatgtaggtctggtagtagctagcagcatccgaggggctcatgttagcctgggaggtcatgtcgggctcgttgaatcccagaatgtaggtgctgccgctagacaaagcggtctggatggcggtcacccagccgccgaacatattctggccccagagcatggggacgtattcgacgcctgaggggagcgaaccagagagatcaccggcccagttgtaggcccacgagatggtgccagcatcggccagagccgacacggtgctgatgtcgttgtaggcggcaccgcgcttgctcgaggagcgcttggcatgcatgggggcggccatggccgaagtggcgacgaggccggcggtgaaaagcttggtgaaagagaccattttgaaagtcaaagtatataagtcacaaaggagtggactagatggtaaaaaggagggaaaaagagagaaacctgttctcgaccttgaaaggaaagtgaggcttagaccgtgcacggcacaggaccagaagaccagaaaacaaatgaaggaagggtaggtggtgaagagaggagggaaagaaggagggaggcggagggtttaaatcccccagggccccagcaatgtgtcaaaccagcctaaccgctggaagatgttccagttccacggtggagtatgggaaatggccattggatgttggccggaggcgtctttggccagaccgtgggatacacggcctcattggcgctggggaatatccgtggaccgttgacagccattggaaccgtgggaatggccttctcctcttacattccttcacacgtgcatcgaagtatactctcccacggcgctaacagagattaattctttcgcttcttcggtatcaaaaaggcacacatcggatgcaactccacagccaagatcgctagtccactccacaatagcctaggccccgatcgggtttgttacatcggattttgtcattgccaagaaagagttcacgtcctggactctgttcctgcgtccgctttgtctgaaatgacaattggcttgcccctggcatcccatcgaagtatacaacggagacaaccgcgacaagggggattgcacgcccgacaacaacaaattgccctaaatcggacggtggagacagcaacgtaccacggttggcattgcatcatccaatggtttgtcatggattccaccgcgcggttccctggttctccgtcaggggagttgtcctgataggtccacccccgatacatcatcgtccgggtccttgggtgacctatcagatcactgtgcctattgaacacaaccctaggaacattgcactacggggtacatttaatttaaatcacttcggattgtaaaagtgtgagattcaatccgattcagtcctgtggtgcttcagtaaatatcattcacacgttacggaggattcaacacatccaggcgtcaactgaaactgacgaattatgacacactgtccagccgccacatcaacagttacggagtaaaatggatcggatcggccagtcataggaatcatagtcacctccctttcaccggtgcgttccttacttctagactgggggcgttgttctagggccagaagaaagagggggcgtctgaaaccaacccctcctcccctcttcccccctgccgatcggttgccgaaaaacggccatgacaagccttgccggactacacgccggtgtttcttctggtccatcttgggattggcgcccacatccaatgttcctcccgttctccaggcatgtcctaattttgtagtcggttttgcttctacttgcttcgtactacctctcataatttgctatgtatgttctcccttgggatcatgactggggatgctcttattcccggctctcctataggctgtggggatatactcggtacacaagtacatatactccgtacctggcacagatttacatgccaagccgatttgaattttcattcatatcagggatttccctgtggtcctaactctaaatctctcaatcattctttgaatttcattgtactcgtactccgtactcccccgggctaatagttgccactatgtacatagcgagaatcacaatgatatcagactgcagtcacctccggctggacatacctccgcacccaagtacgcatgcctgtatctcatgtcaaagaccaagactgtggttctcctcatctgaaacagacccaatcccaccgatctctttgtggtcccgtcaacgtggaccgagactctaattttcagctcttcagggcactttctcggactatgaattccggactatgtcctccgcacggcgtatttttatcataataatttctccgaaaaaaagaaaagaaaagaaaatatgcccgtgaagttgttctggccgtgttggcaaagcaatgtggcttgtctcaatagactcgcttctagcccggttcccactttccctgccgacgctctgcccacgtcatcttactgcgcagagggcttgggcttgggcttgggcttgggcttgctggctttgtacgaagtacacatctacactctcggaaatgaacaaaggaggttcattaatcattacttaccaatctcgaatctcgctttggtctttgactcgagcccaaactgtcgtctcggcattctagctacttttgactagtgcccggactcaacaacgtggactatagaggaccatttttagattgtaacgcgtggtcttggtaggcactcatcgcactggccatatgtcggagtcgccggacagctcgatgacatgtttaggtagctatcgtcgctgatacgaagatgtctttaaagtatcgattattggtttcaggaagtgctgatcatgcatacctgtggttgatataacaagtctacctcgtgttctcatgggatttatcatttcactatcactatcttcggtttatcaaatatagaagcgacgcgatgcgagtctctatgttctcattatcaatggtgctggatatagcacatcatctgttgattttgggcaattatgcatactcgaatggcctctttatatcggcagtctcctcaaacacgaagctccatatgtattaggctttgttatggacctcattaactccagccagttgcctttatcatgtttggtacctgttacacgggtactcgaaagtgtataagcatttacggtggtgtatggaatttatgctaagacttctatgaaaattctgtgtagaccttcctgagattaagatcatcatcggaagacgaagtgctggagtaaatgtgatgagtatcatttataagtatcacatttcttctagcaacagctcacactcttcatcatgagagcaataaatttgaacatattctataattcctactttcttagagttactaaatgctgcagtctcagtggttattggtgacgaactatccacttgcacaacttacaagtgtatatcctcaatctagccacccctaactacctataactcaatataagcattcaacaagctaaaccatcatattgcacaagatctacagtccatttttacaaataaaatcccatccaacaactctcatctataccccatccaatcacaaatactgcccaaaacagcccaattaaagcaggcggtgaaccgcgatgatgtaaactatcccatcgcatcatcagaacagctccaaccttaatacctattccctcccacaccaatccaaaccggcccatacaacaatgctctcccgtacagctcctcgagctctgctcgcatccgtccgcccatccatccgcacaccagcacccaccaccacttcagccatcctcccccgggcctacgccatccgccccagctccgccgcacagttcacccgctcattccagtcgtcactggcaaaccgcaaaggcatccacccagaatccgcaaacccgccagctccaaacccgcagccgggcgttgccggcgctgcttcgcatatcactgagccgtcgccgttgacgccagaggagtactacgagtactcggagcattatttcaatgtgctgcagagcgagctggagaggctgcaggaggaggggtcggatgttgaggctgagtacagtgtatgtttctcccggtctttttctgtgtttattttgtttttcccggtctttttattttccttgatacaaacagaccttgtgttggcatgctatataaaatataaaaatggaaaaaactagctaactctcttcctccaggccggtgttttgaacatctccgttcccgcaatcggcacctacgtactcaataagcaaccacccaacaagcagatctggctcagctcgcccatctccgggccgaagcggtacgactggattgtcgagggcgattatatgcatgagaagcaggagtcgcggcctttcgtcaacgggcagtggatctatctgcgtgatgggtctaatctgaccgagttgttgaactccgagttgaccttgagtttgcccaaggatgtttacagtcaggtcattgagtgagagagttgtcttgctgggctatcgattacctagaaagaagagattcttgtcgttccagttttatttgggatgttgttacatattgtagtttagtgtctatgttatgatgtggttgcattgagatctttacgtgctgttcagttcttaatttgctagatggaggtgaataaatgagttggggacatagttgtgagtatcatttgagctacctgcactgggtgggtatatagtggttgtgtgtagcgggaatcaatgctgaggtgggaaaagtcatctcatcgccaattgaacgggtgtagcaaagtgctgttctttctctttgaatgaacccgacatgtacatagccaaatacagtctcaacccgatgaatgaagcggtgtcttgcctctccaattgattgtccaatgtagaactacaccagagacaaaatcaacggagcccgagtcaacattgaatgtgttgagcgaggtacgatgggtaccccagtgcggtcacagagaccgatatcccccgggatacaccgagtcacttggcaagattggaagatgcatagataacatccgcagcagaacatcgagcatgttcgcgcgatccagtgttcaaagcgaagtccggtggctcaaagccacccagacccggcgagacacatcatgccgtccagacgagcattcgcagccgggtagtggaacagcaaaatatcccaacccctcaaaccacttccgccaaaataattgcaagtggcaacgagccgactcagcagcatggaccgtctcttcgtctgagatagacccgatcatttcaagggtattcgcaaaatctccttcatctcgcactcaagcctgaacagccaccccgctcgtactctgcgtctcggctttaggaagatcagactgtgcataccccgcagggcaataattagccaaccgaacaaaataaagcgacatatatctagcttatataatagggaaacacaccaagtcgaagataacccggatcatcagactgcaactcggacacacggcgatctcttcgccgtcgcgcaagtcgtcgattgcgatctcgaagcggtcgccacatgggcagggatatgtgtagatctggatattcgggtcgaaggtcatgtcttcgatctcgatctcgtcgtagatgttcagtccgtcgtcggccattttggaggattatcgcgtatgtgcaaggagagatgtggcgaatgagtggatagatcttgtgccgttgactctttcgggcagaaaaactttggcgcggtcatgtgatgcgcggggttaaggcagggtatccccgggtttaagacttggcgggggctgatgaatgaactgtgaactttcgtcttaactcaattgtgtatatactcggggggttgtgaatcgggattggatgcactggctcctgccattttgggcatgccatctccaaatatgcagcttcgatacccaaacaaatacagccttagtccagtcggtaggctgcacaatcacaaaggtcattacaggtgccaacaaaagaaatgatttgagctgaaagagatggccatgggttaggcaaggagcatgcatacccacctccatccaatcgtccgcctgaggatttgtctgctctaccaaacagacccctgcgatggttcttctggcttgtcaaatactaaattcaaacatagatgatgttgcagcatgtgacagcaagaatgccgcgatggagggtagccgggaaaacagccaggttgacgatggattaggacctcggtgtgttctctatggctgctggcaattgggcttggggctgtaaggaagaagtgagttaaaaccagcactgcatcaagccgtatcttcattataccatgtaccacctagtgtacagttgtagctcatttctctaatcgtgcaatttccatctttacttcttcaatctccctcgctaaaaccccatagcgacgagcaatatccgggaaagtcccttcatccgcatcgatatcaaccggatcagacacctcgacatcgccataatctctcaactcttgaatcgtcatcttccgacggtgctgcaggcgctccttcgtctgcctgagatgctgcctataccgagcaagagcagcgagtgtttccggcgtatacagcgtagccgcaatctccagttttgtaaccctgtcgaaatcattaaacaaactccaccagaaagacaacagcaagacttgaaagctggaaaggcagaacttactctaatttcccctccacgccttgcgccagcacagccaaatgctctgccttggctttcgtcgcgcgcgccagagccccatgcttcgcccgctccagggtcacaaccgtgcgctccaaaacccgcgcccgcgcagcaacaacctccgcagctgtagcagccatattccgccgagcaaccggcagctcggacagctgtgtgtggcgcagcgcacgtacccgcgcctgcagctgtgacgagagcaatgggaccggcgccatcgacgtccggactcggcgatcgcgtgcccgggcacgtgcgatgtggttcgcgtgtgtggttggagcgtctgcgtcgggcgcggtggctggatctgtgtttacggctgatagagctcgtaggtcttgaacggcagatgagatgtttttggagagtggttggatgaaggctgggatgttggcgtagaaggcttcaatgtccggtgctaggagggtgagtacttcgtctggtttcttgagttcggtttctggctttggggtggtgggttcgattgcgctcgatggagtctctaggtagagggtgattatggccaggttatcgtggcactagatttggtatgtttgttagggatgtggtttcttcttggtgggggttgtactgacctccgccgggaggttggtgtctggggcgaaggccaattgccggagcatttgttccttgattcgctttttggcattttgagtctggcattgcttcagctcctaatgatagtgtcgtcagagctctgttcgtgcttaagtccgttaggtatgtgctgcatagcgcgtcgaccacttacttccaccacagctgtacgggctgggctcgcgctttgagcacgcgttgaggcatctgaattgaggagcgaggttgttagattctcatatagtcgtttaaattgaggattgtgctcaagaattgaggggtcacagggaggaagcatgttgatgttgcaaagaaactggccaagttcaccgccgaagaagacccgacgcgtcagcgccacatagacagtaaggaaagaaattcgcaatacaagatcgtacattcaactacatacctaatccatgttagatggtttaccattacaagtacatattcattttgcatttccgcgtttctttcataatcatacaagttgaagccaaagcttcggttcacctcttccaaccgcaacgtcgtcggggaaatagagcaacctcatccacctatcctggctgtgaaccgaaacgggaaaagcgtacactgaggcgtaggggaagggaaattcaaggggatgagtgaataaaatcctgttcggccaatcttgagcataaggttcgtcggtggcagagaaaccttgccgggtgcaggggtattcgagatcaaagtatgtacagacgttgctggcggggattgcgtagcgcattgcaagcagcccgtcaggatccagcggtgtgactgaaaaagaaagatgtagcgagaaattgttcagaaaggcactgagagaaaacgacgcttggaacgcgagggtggagggccatcccgtatggaaaaaattggcgggattgagtccgaagagtacatttactcctcctcgctctcttcttcagacgaatcagattcgtcatcgctgctttcgttgcgttcaaccgaggccactggatcaggagagtgagcgccaccctggaaacgagaaaggttgctctggagcatgttgatctgagcctcctgctcgaacttgctcattggcttgttcttcttgggcttgggaggtgccacactgctcgcaggaagatcgtcttcgtcttcatcatccatgagattcggcacgtgcttcttcacgaagttgagcaacttcagcaagacatcgttagggagctcgtcgatgtccaactcaatttcagcctcgtcggtaccctaaatctggattagaactggtctgtatgtggtgaacgtataagaatcttaccttaagttgaggaacattgttctggataatctggagggcttgctgcatccttttatcgggaagactactgataccgttcgagataatctgcttctcgttgtaggtgatagcgcgggttttgcctggttgagagatcttgctcttcttgtccctctttccagaactgatcttcttggaatccttcttcgcgagcttcttcccaaccttcttggaggaaggaggtgtcttctttttcttattggtaatagcctcgacctggcgagacatctcggcaatttgcttctgaagcagcgtgagtttctcgtcatcttcctcgctctcttctgcatcctcgtcgctgtcttcatcggaagaatcagtgttctgctcggggtgtggttcatgcgcttcgaggtagtccgacttctgggcccactttgcgttgaagatttcctccgcacgctggccacagacgaaagtgggatcaccggggatattgaagcggtaacaattcttgaaaatgaggcggacatcgttttcgaactccctggcattctcgtactggccggtcttaagtttggattgggcggtcgacagatccatcggcttcttgatgacgctgtggtatgtgggaatgttcaaagcaacggggtccacgggataatagaaaggcatcacccagctgtagtgcttttgcttgtgcagctcatccaagacttcctggcaaaagcgcagttcccattggaacttcttcttctttggcttggtagaatacgggaggtcacgcttcggggggtggatagaccgcttggggcgaccatcggggttcgaagaatcgcggcggatgacgggcagaccttcgggtcctagcgcaaatgtctgagactggggagaggaagccttgggctggcttggcagagaagtccgaggctcccggcgagcagcagacgtcttctcagtgtgcttctttggctttcgctcttcaacctcttcgggcttgggaaggttagtcatctgcttttcaaatgtcgccttcagcttgattccctcttgggtgaccaggtggtctgcgccattgaagacggtggtattattgaccatcagtgcaaagtcatctgcgactgcctggggggacgaatattggttgttcttgagcttcctttccatagttcctagatccatgggttgggtgataatagtgtggtattgggggatgttcaacttgatagcatccacaggttccttgtagaaacgcgcatcgtgcatgcgcttaaggcttgtaaggctcttcaaaatgaacttatgctgcatcttcgtgagccctggtccgccaccagtgcgggttggaccaggtgttgcagcagctggcgagctgtatcccggtgtctggaagttaataactgactcgtcgccctcgaccttggtccgcttaggagctggttcttcgctgagatcagcatcccgttgccgggaaaccttggaaggagatggcggggcctctgacccgtctttcatctcttggtcaacgtgttgcggcgcggtgagcacaggtgggagcgcaggtggtgcaggggccgtggtagggtgatgagggaggtcggttttcacggcagtcgaaacatcttgaggggtatcgataaccattggctcgggtgtgtcactaggaccatctgtcgatgcaggaaatgtggaaacgtgcgccgcaggctgtggggcggacacagcggcactttcagccgcggtgcttgctggagcaggagtggtagatacctggccctgtggaaggacgttcttgtcttcggtcggctgtgcctctgcgggtggagcagatcccgcggcagatggcgtcttgttttgatccactcctggagaggtttggtgctcgggggatttaggcggtgaggtagcaacgattgttccattggtgtttgaaggctcgacgggagtgtggccattgagcgcaggcgatttaacctcggtatccgtgggaccatcacttttgagattcactgtggcattttgcgcgctgcacgccagtcagaacaagaacagagcagatataaagctgatgcgcttacctggtgggtggatagtcaggcgcagaaggaccagtgggcgaaggaggcaattgaggcttgtcctcctttgtaacaggaggagcctcgggaggcggagtcgccattagggtcgcgttggataaacaagaatacaagctagggaagggtgagatggttgaagatgtgagagttataggagagtgtttgaaaagctagtgatcaactgaaaacacccgtcagatctctgcgcgaatcaatcttgccgcgtcacaatctcgagtgaacaaacactagcggcaaccaaagccacgtagtacggactcaatagttgatgaggtttgatatcacacgtgtgggcgcgaataaaacgcgacgggcggggggatagtgaggtcagagatgatcgagagataggaagagtggagaatgcgatcggagacaggtatttatactgccaagaaggcggtatggaagcgttcacgtgacgtagtagaattgacgccaggtctagatgacttggtacagcaagatatggagctaagaacttcccgtgaatgactgcctgaggccaatattgataaaagcgaattatgaaaataaaataatgaaaaaagaaataaaaaaagaattcggggtctgagggcggttaaaaggaaatagcaccgggtgacgcgagacgcgtttgttatgggcagggcggtcagcgaaataaaaataggagaaaccaggacggaagcagaaaaatggtcgggaggggatgccagaatccttaagtacaaacggccgccttgcacgcagttccaccagccacactaatcccgattctctgaccttcttaccccttgattggttctatacccctggccctttttccttttcttcttttcttttcttttgggaacttttcccttttcttatatatgaaggtgaatatactgttgaatatctttttcaaaacactgtttctttttggttttcttcttcggcttttctatacagttctcataaccttgaaagtcggtgggcgcatatctcggatgactcaaagccctagggttttggctaaatccggcttaggccgggcggatgggagtctgagtcacgtcaccactccatctttcacgtgactatatcatgatgagtacacgtattgtaattgataagaaatagcatccttctataacaagtactgagtactccgtattcggcgcaaggtaaaaacttgaatattgaatatccagatatcgtagagtagagtagctcactactatttgctgccaataatcctagaaattacaatcagcactttgcatttacatactacctacggagagcgtaactatgtacatacataccggataatgcctggcactcaagacctttccctttccgttttagtgctcacctcttgccgctttttgatcactgagtaaaactgagcacgtccctgagtatcctgacttgatcacgggccattatataatcaacgtgatctgctcactgagcatcacctgattatcccctgagccccctgatccactcactgatcatcatctgagcaccctgatttgcttactgagtgctctctgagtgtacggctgagcggcctgagtaagctacatcaataaattgcgacacgctaatcccatcacgtgcaaccctttccatttagatcgcccatcaaaaaaggactggcgcagtcaacgtgacccttcatcctagcggtctcgaccctatccaagtgaaaacctcgcagtggggctattcaattgacccatcattttcccattccagcctatgctcctgggaataccctcggaatacttcgcttaccagcccggcgatcctctaatcgggctttggactactaccagggcgagggcgattggacgaatttccttgattagagcccttccctgtatcaagacaactagagtaataagtgtttagcaggtgacgatgatgaactacttctctcgctaatgagcgtgtaagtcgaaggcgtttctgagcgtataacgtcatgtctttcgcgctatttctaagtaggtcgtaaaccgaagacaaaccatcaacagtaatacccagatgagctcctgggagcccgcgggctcnnnnnnnnnnnnnnnnnnnnnnnnnnnnnnnnnnnnnnnnnnnnnnnnnnnnnnnnnnnnnnnnnnnnnnnnnnnnnnnnnnnnnnnnnnnnnnnnnnnnnnnnnnnnnnnnnnnnnnnnnnnnnnnnnnnnnnnnnnnnnnnnnnnnnnnnnnnnnnnnnnnnnnnnnnnnnnnnnnnnnnnnnnnnnnnnnnnnnnnnnnnnnnnnnnnnnnnnnnnnnnnnnnnnnnnnnnnnnnnnnnnnnnnnnnnnnnnnnnnnnnnnnnnnnnnnnnnnnnnnnnnnnnnnnnnnnnnnnnnnnnnnnnnnnnnnnnnnnnnnnnnnnnnnnnnnnnnnnnnnnnnnnnnnnnnnnnnnnnnnnnnnnnnnnnnnnnnnnnnnnnnnnnnnnnnnnnnnnnnnnnnnnnnnnnnnnnnnnnnnnnnnnnnnnnnnnnnnnnnnnnnnnnnnnnnnnnnnnnnnnnngcccgcgggctcccaggagctcatctgggtattactagggttctaaaggttcatagctatttcgttctaatcctaggaattctaagcctcgcccgtttggcctagcatttctgcctaaagtgatgccatttcaaaggggaatatatatgcctagtcacttactccgaaaacaatggtcttcatcattcctctgcatccaagttacttaaccaaaacaaaaagcctgcttttgaatatatcacagtgagttcagccttcattcactcgtcgttctgcatcaactgaccgtactccagattggcatctcttttgcttacgatagtcgaatcgatcaacattgtcagcctccacgcccacgcaaaatctggaagctaccaaaagtacaaccgaggctttaacaacaggactgtgccatcggttgaaccttcgctgacattgcttcagggagactgtcatcagcattggatcaatcggaagctagcaagctcggtcatggatcccaacatcatcttcggttggcaatccggagcaacggagatgcaggtgttagattccaggacactttcagagaatggactaaacactcggccagcgatactatgcacgaaccggactgacatcgtcttgatttcttttggaacataaaagtgcgactattgacagagcggctgcacacgtttgaaaataccacatatacgacgatagaactctctgcgtcgtatgtaaaagctctcaacattacaacactcggctaactggatcactatactagacatgctatttttctcacctctaagagcatcttcaataaggagagaaacgcagtattgaccacggaaatgaaatattgttgcagttgttgaaacaaataagtggcaacatataattcagaacaggcggctggcactccagcgcatcactcatgaggccgaaggtcaggccatagggatacaaaagtccttccttgagaccttgagaggggccatatccgtacttgaggcctcccttaaactttaagtctcgtgttcttcagtcgagtaagacctacggacgcttgctcctcccacattataggtggaccaacgggttcaatagtatggttcgagaggctcacgagcttggcagcttaatagtgggcttttacagtatgagctccggctcccaaaagggcccagacttgcagcgtcactttccccaagggggagcggaaatatggtgcgaatgcgtatgaagatggaaaagagccgttcttccctcgcctttgagaagatacatgatatttctggtgtgcatcttctcagtttgtatcatttcatgctgacttacagacaccgctctgaactgtcagatggacccagctttccctcatcttggaatagtgctggtccccagtaaaaagcttgggtgaaatacggaggacgcctccaatgggacgaacgcacggtatctgggtccttgatcgatttagatctaagacagtagaagggcccctccccatgctcctcagcctaccagctccgttctagaaccccaaacacgaggctggcggatcctcgggcattttgtcgccgataacatgccctgagcacgtcagatttatatgacagttccagtaacgattgttcctggaccagcggtcaatacgtgatttcataccttcagcaactccatttcctctgaaggcctgttttggcgttttgcaatggaatttgttaagattggaatcatgaccggagacgatttgaatgcttttaccgtggttggataataccatttcattaattagcttggttatgggtgtttggttccgtatttgatacatgtcgtcaatgtttctctccgtaaggtattacggctcttctggtcaatctgcacagccaccatcgcgagacagatcagccacaatgtctgtaagtctcgtaattgttgagtttactgaaacagaaatatttttgtaatataccgtcattgtacagtttccgccatccctgccttttccacttttagctgacaccaatttggtatcctcgggcagaccaatggaatgtaaataaacttaagtaagtgtcgcacaaaaacttatcggatttattgatttattgatgggaggctagtatttatgcgcccattactcgcatttgaaagaaaggccttggctacaatccaaaatcacctgcaacaggactaggcgaaaagaacagacatcgctactacgcatgaaaccaataggaagtcttgattcttcgatcctatcttgatacagattagcgcaccgagagagtatggttcgaaaagcagcataagagcacagagataagatctacctcgaaagtactagacatcaaattggaattcaggtgaactagtactgagccagatgcgaatctcctccaaggcatttaggtcattctagaaaagagaatgctgtaccttctcatcgtacaattcgtaagtatggcatcttctaggctctctcatacactccggcaagaaccaaaatcaatgaaaattgtccgatgattatcaatcattatgttgcttggatgacgtcgttatgaaccaacccaagcggatgaagatgcttgaccccactctcgatgcccgtgagaacacaactatagtccgtcacttgccgcgtgcttctcagtattctcttcatgaggccgcgtgggttggcctctttcatcagcatgtgagggtatatctcaaggcaaaaggcccgtgattgtgccgtcagaaacctgacaaccgagatatgtagcaatgttgggacatgggtgccgccttaagagtttcgttaaattcttgcttccttgaggtcctctgcaatcgagtcaggtcgaggtccttgactgattcgatcgtaactgatcaattgaggctttttgacaaagtaattgttcggcagggtttgaggtgctggcgtaaactcagtagaaaattttggattgtaggctgagctaggaatttggataatattttcaaaattctctggctttcagcatcgcgtggtacaaatcccccttcatctgatacacaacgagggtacctgcgaaatggaagccttcaagccttcatctgagtcttcgtagacctcgtttctctccagcacctccagttgttggttaggatttggttgggtcgacatcgctcgagtgcactttgccgtgtcaatcattgagacaccaaatggcagatatgcactcacctagtaaacgtgcacgggaggagggtcaattagactatgaagcggcggaggtgtgaaaaagcgactgaaagattcgaaaggccaaacggcgtatgccatcgtcaaggaacgcaaccatgggcatgtcagggcttattcgtgaagcttctagggctcagctactttatagaaagatatttcatttgatgctataccaggctttgagcttctttgtgtacagcgatcaggttctctaagtgcaatatgggactgtaacagcagatttttctccgtgacctgttacctactgctcatcattctctagtgatggctaccaagaacaaagttgaagagcccatccctgatccagggaatctccagtgctacgggcttgtgctaatgctacttaaactggaaagggatgcactactaaatggatattattaaattactcacccgtggcgcaagtctgcggtgctttaggcaccaaaacgctttagcctttcatgctagctttagacgactggtaattatcgaactacacgactacttgatggtttcacgagggcctagatcgccctcgtcagtactctaaataggttcagcctttctggatactatgcgataggcaagaccatcgtataggaggtggctcacccaacgatatctatcattctcgaggtcctaatttccacttctaaatcaaaacggctgtgcgatctcacttggataaaccatatacgatgctaatagttagcaacattccttttagtctagggagaatagaaattactccacttcccgctccatccatatctcaagcctgtttgcgcctatagctatggctattagaggtcacgtagtccttttggtgatcttaaagaggaaaatagacacaactacatgatcggtccctcgttaagaataggctctgtgggttataaccgtagtactaccttaattgatggcaacggtcatttgcttaggcattgcaagaaagccagacatcgcgagttagcaactcttttaactattggccatagtaaacagcgtggttaagagtggttaagaagagtggttaagaagagtggttaagaagagtggttaagaagagtgnnnnnnnnnnnnnnnnnnnnnnnnnnnnnnnnnnnnnnnnnnnnnnnnnnnnnnnnnnnnnnnnnnnnnnnnnnnnnnnnnnnnnnnnnnnnnnnnnnnnnnnnnnnnnnnnnnnnnnnnnnnnnnnnnnnnnnnnnnnnnnnnnnnnnnnnnnnnnnnnnnnnnnnnnnnnnnnnnnnnnnnnnnnnnnnnnnnnnnnnnnnnnnnnnnnnnnnnnnnnnnnnnnnnnnnnnnnnnnnnnnnnnnnnnnnnnnnnnnnnnnnnnnnnnnnnnnnnnnnnnnnnnnnnnnnnnnnnnnnnnnnnnnnnnnnnnnnnnnnnnnnnnnnnnnnnnnnnnnnnnnnnnnnnnnnnnnnnnnnnnnnnnnnnnnnnnnnnnnnnnnnnnnnnnnnnnnnnnnnnnnnnnnnnnnnnnnnnnnnnnnnnnnnnnnnnnnnnnnnnnnnnnnnnnnnnnnnnnnnnnnnnnnnnnnnnnnnnnnnnnnnnnnnnnnnnnnnnnnnnnnnnnnnnnnnnnnnnnnnnnnnnnnnnnnnnnnnnnnnnnnnnnnnnnnnnnnnnnnnnnnnnnnnnnnnnnnnnnnnnnnnnnnnnnnnnnnnnnnnnnnnnnnnnnnnnnnnnnnnnnnnnnnnnnnnnnnnnnnnnnnnnnnnnnnnnnnnnnnnnnnnnnnnnnnnnnnnnnnnnnnnnnnnnnnnnnnnnnnnnnnnnnnnnnnnnnnnnnnnnnnnnnnnnnnnnnnnnnnnnnnnnnnnnnnnnnnnnnnnnnnnnnnnnnnnnnnnnnnnnnnnnnnnnnnnnnnnnnnnnnnnnnnnnnnnnnnnnnnnnnnnnnnnnnnnnnnnnnnnnnnnnnnnnnnnnnnnnnnnnnnnnnnnnnnnnnnnnnnnnnnnnnnnnnnnnnnnnnnnnnnnnnnnnnnnnnnnnnnnnnnnnnnnnnnnnnnnnnnnnnnnnnnnnnnnnnnnnnnnnnnnnnnnnnnnnnnnnnnnnnnnnnnnnnnnnnnnnnnnnnnnnnnnnnnnnnnnnnnnnnnnnnnnnnnnnnnnnnnnnnnnnnnnnnnnnnnnnnnnnnnnnnnnnnnnnnnnnnnnnnnnnnnnnnnnnnnnnnnnnnnnnnnnnnnnnnnnnnnnnnnnnnnnnnnnnnnnnnnnnnnnnnnnnnnnnnnnnnnnnnnnnnnnnnnnnnnnnnnnnnnnnnnnnnnnnnnnnnnnnnnnnnnnnnnnnnnnnnnnnnnnnnnnnnnnnnnnnnnnnnnnnnnnnnnnnnnnnnnnnnnnnnnnnnnnnnnnnnnnnnnnnnnnnnnnnnnnnnnnnnnnnnnnnnnnnnnnnnnnnnnnnnnnnnnnnnnnnnnnnnnnnnnnnnnnnnnnnnnnnnnnnnnnnnnnnnnnnnnnnnnnnnnnnnnnnnnnnnnnnnnnnnnnnnnnnnnnnnnnnnnnnnnnnnnnnnnnnnnnnnnnnnnnnnnnnnnnnnnnnnnnnnnnnnnnnnnnnnnnnnnnnnnnnnnnnnnnnnnnnnnnnnnnnnnnnnnnnnnnnnnnnnnnnnnnnnnnnnnnnnnnnnnnnnnnnnnnnnnnnnnnnnnnnnnnnnnnnnnnnnnnnnnnnnnnnnnnnnnnnnnnnnnnnnnnnnnnnnnnnnnnnnnnnnnnnnnnnnnnnnnnnnnnnnnnnnnnnnnnnnnnnnnnnnnnnnnnnnnnnnnnnnnnnnnnnnnnnnnnnnnnnnnnnnnnnnnnnnnnnnnnnnnnnnnnnnnnnnnnnnnnnnnnnnnnnnnnnnnnnnnnnnnnnnnnnnnnnnnnnnnnnnnnnnnnnnnnnnnnnnnnnnnnnnnnnnnnnnnnnnnnnnnnnnnnnnnnnnnnnnnnnnnnnnnnnnnnnnnnnnnnnnnnnnnnnnnnnnnnnnnnnnnnnnnnnnnnnnnnnnnnnnnnnnnnnnnnnnnnnnnnnnnnnnnnnnnnnnnnnnnnnnnnnnnnnnnnnnnnnnnnnnnnnnnnnnnnnnnnnnnnnnnnnnnnnnnnnnnnnnnnnnnnnnnnnnnnnnnnnnnnnnnnnnnnnnnnnnnnnnnnnnnnnnnnnnnnnnnnnnnnnnnnnnnnnnnnnnnnnnnnnnnnnnnnnnnnnnnnnnnnnnnnnnnnnnnnnnnnnnnnnnnnnnnnnnnnnnnnnnnnnnnnnnnnnnnnnnnnnnnnnnnnnnnnnnnnnnnnnnnnnnnnnnnnnnnnnnnnnnnnnnnnnnnnnnnnnnnnnnnnnnnnnnnnnnnnnnnnnnnnnnnnnnnnnnnnnnnnnnnnnnnnnnnnnnnnnnnnnnnnnnnnnnnnnnnnnnnnnnnnnnnnnnnnnnnnnnnnnnnnnnnnnnnnnnnnnnnnnnnnnnnnnnnnnnnnnnnnnnnnnnnnnnnnnnnnnnnnnnnnnnnnnnnnnnnnnnnnnnnnnnnnnnnnnnnnnnnnnnnnnnnnnnnnnnnnnnnnnnnnnnnnnnnnnnnnnnnnnnnnnnnnnnnnnnnnnnnnnnnnnnnnnnnnnnnnnnnnnnnnnnnnnnnnnnnnnnnnnnnnnnnnnnnnnnnnnnnnnnnnnnnnnnnnnnnnnnnnnnnnnnnnnnnnnnnnnnnnnnnnnnnnnnnnnnnnnnnnnnnnnnnnnnnnnnnnnnnnnnnnnnnnnnnnnnnnnnnnnnnnnnnnnnnnnnnnnnnnnnnnnnnnnnnnnnnnnnnnnnnnnnnnnnnnnnnnnnnnnnnnnnnnnnnnnnnnnnnnnnnnnnnnnnnnnnnnnnnnnnnnnnnnnnnnnnnnnnnnnnnnnnnnnnnnnnnnnnnnnnnnnnnnnnnnnnnnnnnnnnnnnnnnnnnnnnnnnnnnnnnnnnnnnnnnnnnnnnnnnnnnnnnnnnnnnnnnnnnnnnnnnnnnnnnnnnnnnnnnnnnnnnnnnnnnnnnnnnnnnnnnnnnnnnnnnnnnnnnnnnnnnnnnnnnnnnnnnnnnnnnnnnnnnnnnnnnnnnnnnnnnnnnnnnnnnnnnnnnnnnnnnnnnnnnnnnnnnnnnnnnnnnnnnnnnnnnnnnnnnnnnnnnnnnnnnnnnnnnnnnnnnnnnnnnnnnnnnnnnnnnnnnnnnnnnnnnnnnnnnnnnnnnnnnnnnnnnnnnnnnnnnnnnnnnnnnnnnnnnnnnnnnnnnnnnnnnnnnnnnnnnnnnnnnnnnnnnnnnnnnnnnnnnnnnnnnnnnnnnnnnnnnnnnnnnnnnnnnnnnnnnnnnnnnnnnnnnnnnnnnnnnnnnnnnnnnnnnnnnnnnnnnnnnnnnnnnnnnnnnnnnnnnnnnnnnnnnnnnnnnnnnnnnnnnnnnnnnnnnnnnnnnnnnnnnnnnnnnnnnnnnnnnnnnnnnnnnnnnnnnnnnnnnnnnnnnnnnnnnnnnnnnnnnnnnnnnnnnnnnnnnnnnnnnnnnnnnnnnnnnnnnnnnnnnnnnnnnnnnnnnnnnnnnnnnnnnnnnnnnnnnnnnnnnnnnnnnnnnnnnnnnnnnnnnnnnnnnnnnnnnnnnnnnnnnnnnnnnnnnnnnnnnnnnnnnnnnnnnnnnnnnnnnnnnnnnnnngtggttaagaagagtggttaagaagagtggttaagaagagtggttaagaagagtggttaggaagagtggttaagaagagtggttaagaagagtggttaagaagagtggttaggaagcggttaagacctgaacgagagttgaaggttaatcggggaacgtttcgatgtaagtcttggtcatatccagcatttgctcaacgcatccgagcgactctctcattgaccgatttagcaaacaaacctcagggcgcactattttgagccctaggcggtccggtccaccttccagcgacgagaaaagttgattgcaccatctaggaatgttggcattgtgaaaacttctgcataaaagcccaggccgatacataaatctgcggtgtacaactactcttcattctcacgagcccggcaacgaagatatagaatcataaaacgacaatacttgctctctcttttggcaaccgatcattggcggaacaatacccggcaccctcgtgtgatgaaggtagcaacttagccaagcgcacgcatgtgagtctggaaactaaggtggtagcttgccgtgtactgctgtattgacattctgatgtcatgctctgctttcaaatgcgatttttgcccgagatgaagcgtcctgcggcggacgagtgtgttgtaattgaaaagtcattccattattcggatagccgcctgcgaaagctccgatactatgtaacttaggatggcttcgtgcgtggggaaaacactgcgcgcaaataccgggaaccaaaattgtacagctgcttttagtttttatcttccgcaacagagctttgaagatcaacacatggtaagaagtagtcaggatcgtttcaaatccagtcaggagagattttgggcttgtattctagagttcattcataatcgggtttttctggcttatatatctttcaatccgcgcaaggttcctctgaccatgccttcgcgatgagtccctgacattttgatcaatggaactgtcgtatacgcgaaacaacctgagacgccaatgcgcatacatggacaatgatcatcaaggactaatcacaagcaaggttgattcccatgcggctaattcaaacgctgtcacagacctaggcttgaagccattatagtacacacggaggttgcctctgccaacagaaccatagactctgggaggcagtgggatgtttggagatcagatgagtctgcgccttagctgcagcaacccctggtcgtttgtagccaatcaaaccagtacccggcagagcaaaatgcatcccaggagctttggtattatctttaccacgaaaaaaaaaacctaggcagctagcattaaccagccaatcaaacaaagtatagactgagaaatgctaccttctgtgaatctatcctaggagcatttgtatcatgcaaagaccggggtaaattggccaatggttcatcacactatgcacgaaccttgattcgtaagtagctcttggcactttcctggcactcttctggcactcttctggcacttgctcttcaacccttcagaatgtcatccaacctacctctaacaggcttgatatatggatcgagcggaaaatggagtaacttctattctccctagactaaaaggaatgttgctaactatagcatcgtatatgctttgtccaagtagaatgcacatttactacctcggcgccgaaaccggattggaatgatttcacgtttcagaagtcagtttgcagcatgtattcaaaccgttgctggatatttgtcccgcgaggtatcgatgagaacgcatacagccggaataatatctagaaagtcgggtcaatattgatgtcaaaagatataatcaagcatagaagcaagaccatagctgcagcatccccctctgtccatgaatgctcgtcaataactactatcacccacatatacccgaccagatagttcctataccctgcgcttaccacggacttacatagatcccaccaacgccgggattagacgcccagaaactgccaagtgtcccgcccagaccttcggccagtagaaccccgcgaatggccctctcggcatatagcagtaagatgagcgagttctcatacggctcgtatccaattgcattagcgcacggcgttgcagtgccttaaagcaggacggtcgtcccaacaatctcgcagagtaactcctccacttcacctcaggcaataggctttccacgcctcatctcacaggaaagatgaacagcatcaaagcccgattcaagaggatgtcaataggtcggaccgggaaggatcccaatgcaagtggaaagacagacgccgcagcctcggcagagaggacgccaaacgaaggccggaagaatgcgccagccaattccaatgccgcgaatgttgacagtggtctcgctgccgcgcggatgttcatcaaagacgaacgggagggcagtttggtgtttaccatccaggttgcgaccgcttatcgcccgcgcatcgcggtggatgtgcatcggtttggcaaggaacaaggggacgggccatatggaaagctggccggcttgatgaagatgtcgggggcggagcacgggttcgtggaggcggagcatccgtcgtttggttggagatcagatgagtctgcgccttagctgcagcaacccctggtcgtttgtagccaattaaaccagtaccgacccggcagagcataaatgcatcctaggagcttttggtattatcttaccacgaaataaaaaaattagaaaaaaataggcagcagcataggctggctctggggctgattccgtttgtggtcaacgaaaaaattagcagagaataattgctttttgtaaaacgtccaacgctgaacatatttaggtgccgcagtttcctgccgcagcatgtccgtattggcgcaaatcccaacgtgtacggccccaagagcttcagccaccattccatccccccgcaggagcgtggtttctattgtagccaataataacggaccgaaatgccaagcccaatcaaagagcggtgtctgtcgtgtccttcgtgtctgtcgtgtccatcgtgtccatcccgtcgtgtccgtctgtcgtgtctgtcgtgcccatcgtgtccatcgtgtccacaaactcatcgcggcaaatatgaacaaattcgctccaatatacgaaaaacacaaagatattggtgcagaacaaaccattcccgaagccgacatctcactatttgaagaacgcttggtcatagtttgcacagtcgacgagacacaaaaccacaggcgtgtgagaataccaaaccgtgtgaaactcatccgatctcgagagcggaaggctcaaaggctttatctgaaaatcctcgagaagtttcctggcatttttctcgctttcatcctctcagtctccccgagagcttctgtagattttgacctttcggccttttgtgagcaacacactgaacaacctattgttctctgcgacaatgctgaatcgcttctttggcgaagtgccatcagacacggtattgagaagtctaaagctttcggaaagttgatgagtctacttttcagcttgcctcgcccagcgacagaagccgaaggggaagaaagttgttcgttatctctgagccgtctttctgtgatccgcatcgcttttggtgatataatatgtgaggcagttgaatgttctcccactcatcttccaatgaatgcggacagcgattatgcagaaataacacagtgtgtcaggacgacagtattctataaccaccaggacaccatcattcatattgatgtgggctgcgcggtcaagctcgctgacatgctcttcccttctgcaagcagaagaatcaattctgctctctcccagtccaatgccagcattcaggcgcggaacccaaaggctgtcttgctcccagggatgcaatcagaatcactggttcaagattacggtacgaaagagtggcgttccatgacaatgcagtgtattaattagccctacagatttcgcatacttcacgttgcgtggtgcgtctgttgccggcataagatcggtgttcagtgcctccatctgtgaagctatagaggagagcgaattgaggagatgggaaaagcaccatctgcttactgaagttacagactgtatcacgatgcagctatggagagcagaatcacaacgtggtctcattaaattgcgagttggatactatacaggagtcaatttggcaaacaaactttatgcagaaccccgttcatgcatcgcttcttgaatcgggccgtcaatctatttcggtgcaccttgcttttccttttcttatccaagctccaacgttctctggaagaacaattgcgccactcccctttgtctcgcatatcttctcccctccttgtttctgaaatcttatatactcgcattccaagcaatataaatttcttgggaaaggttgcggctcgatatcggtaattggaagggctctgtattttgagaggcggtcgacttcttccttgggaagctccttccactcggcctgagataggcgctcgctctgggataggtcagaccatacatcctagaaggcatattgtagcgactcaccaaggacttttctgtgattgaatctgccatcttcagcgaatgtttgagcaagaaaagggtttgcttgcgcgacacgtcttggatctcttcggtcgagatgggagtaactctcaccgcaagattttgaggtgggcgtgaacgcaggaaaagtatgccacaaatttttgcccagattgaatagcctctgaggaatataaaatataaagacgagactgggcacgaagaatgaaccttgggaatcaaccgcgggttaggcatcggctgaaaattgcccaactctgcccctcattcttcttgcacaatggtggggccaccttgtggctccggaaatcgccacccacacgtgactcgcaattctccggcaatgcgtaatgacattaaccgagatccattcgatcgaggagatagagtttcaaaacagctaaggtgtccaaggtgtccaaggtgtccatcgtgtccatcgtgtccatcgtgtccgaggatcgccatgatggagactttagcttgtgccgcagcccaggctctggtagtatttctactttgactgagcttgatccccatttacctacctggcgttccttgccttctcggcaccacaaaaagattgctgcaaaatctagtttaataagtcgtaataatctaatttgtacttgatgaccatttctaacattcctaatttctatatagatggatccatggcagacatcatagattggcaacttataccgatctacgacaactactttcatgcctctatgtccacgaataaatgacatattgaaataactgcatctcaaccgttatataagtcatccccaagctattctgcaggctgtagggggacaatatccatgatcacatgcaaaactgcaaagacccagatacgagtcgtcttcgccgataagaggcgccccacgagctccagttgatggtggaagcgggattggagttccatactgcgtacaagtgcagggtccagatggacaataaccatagctgcaacaaaacgaacacaacccgctgtagttgctggctcctgttcctgcaatgcaggccctattcctaccaccaccccctcctcctccgcccccgccgccgcctccacctccagcatttccaccgccagttccacctccgccgcaagttcgggttggaggtgaacttggtggagttatagcctcggtaactgtcacagtgacaacagttgacgaaatagcagagcatggtccaggggcttttgttgtgcccggaggagaacttggcaatatggtgctcttacttggagatggagcaggtgggggtactgtacttaatgagggggtaggttgacatgtccggacacgcaggccctgtgtgaaggcagagagcccttctggctggagggcatcattggatcctggtggaagcgttccgactgcacgtcaaagttaaaagggggctatcagcagtgctatatcttcacttaccgtaggcgttgaagttatacaaaccacacacgcacccgtcgataacctccttcaaactggtccctgacagaatggtctcgccgtcgcgattgacctcaaagctttgtgtaccaactcccattggcacctcctttgcacttgccccggctggcgcttcgtaattatggatagtcccgccgctgttgacctgcactgtggctggggctgtaagcaatgatacaatgaagacagagtcggccatgaattcccagccatctggacgacccatgaaatagttcccactgccattgttcgctggtaccatgcaggtgtctgtagagtcgcagttcaccccacgtggtgcaggtcggtaccagtagactaactcatcagatgatatatgactgtctggagacgactggtctgctttgaacgcggcgatgtacggttttgaaatgtccagccatccttcgtggggcctgtagttatacattactttggctcccgttttgaaggtttccacgggtggatttgaagttctcacatgtcgttaacccatttagaggccccgtcgtcagtgtgcggtgatcccaaaggaccaatataatgagactctccatagtcattccatgttacaatctcgataaatcgcggtttcaactcaagaatctcattccatctgttaaaccacaggagatcagacgggaagttccagtttttgctataagaaacttcgggtccgaaatgcgtggaaaaccacggggaaacagctgcgtcaaagtcagaaaaattaattcaaatttggatgaaaactaaactgacgggcaatataggccttccgccaagagcatcgacatattccctatcaccgtcggcgacagaaatactctgctctgcagttggggctttgttctttccgttgtttggccacgccatccaattcaagaggccgtcaactggcgagatatctgtcccagttgatgggtggaaattcggtgcgaaaaagaccggtcttccaactgctgctcgcattgctgcaacattcattccatcaccagcgaatgatgaaacgaataccttgtcatcgacgagaagttgtgcaggtttgctagcatactgggcaaccttctggccaacttcggcggcctgttcaatatgccaccagttgaaatcaaatgatagaaaggctttcatgtcattgttggcggctgagtcgtatgccagttgaagttgttgatcagtacagggatctgtgccaatgttcagagcaaacgcatcaatgcctagagacttagcccgtttcatgtcgtcatcgtagtccgatgcgctgtttctattgctgacgattccaatcttttaaataatcagtatatgttcaacagacacaaggaacttgagggcatatttaccataaagtgtgcaaagaccagtcggtctgtcgattgtcttttgacacgacgtatgccatgattccccgtagacagtgcatgaactatagtggatagtaaagtaataacacacaaaatgaaccgcatattcatcatgatttgtaagttcacttagttcatcttgggtcaatcttcaggattctggtttaggtatccatatgtgtgttgtgcgcgttccacgcctttaaatagtcctttcattctccagatgacgcggagcttctcgctgctgacctacgaagcttaaatatcaggatgatgagtgtgatatttgatagttatctctccgagcccgatcaaagccttacattcagggaaccatgtggttgttacagagctttgggcgacatcatcgttgagtgggaacgctattgcccacaagttctcgttattgcgcggttttccgcttcaattaggtacagggtggccgccggatgattccttgcgtagtagtggttgtttaattctatatagttatacatgccggtgaccgtacacaaatcaaaaggtaggaaatggtagaagccgtagaacatctaagcccttgtgattcgacatgagcgtaggggtcgatggatagttctgctgggcttttaggattacactgccatttttccggaactgcatccgtgtctgccattcaaaaaaattgtgtagtttgttggtgccagaatcaagaacactattcagaaaagccatcaaattacaccttgtactaaccacctcgtcatttagcctttgcccttataaatatattccgtgcagatggattcatggaaaacttggggcaagataaccattgaagcctttacataaatgtcaaataatccacacaagtgacaatcaacttcacttggttctagatgcagccccaatccattagtgctcaaatctccgcctgtctggcgcatttgatctagtgtagtacaaattttcttcatcttgcttgaagtacgctgaaaacttaattcctgtaaaaataaagcggttgggtcgcttttcagtagcagattcgcgcccattgatccgggtcttcagagttgagacaggtatctcaaaaggtcgtgcagcagcagctgcagggggatatttgccattttgtatagcttgtatggctaatagaaggcgaccctcctgctctatcaaattttctttcttatcggggcgtttgggggggggnnnnnnnnnnnnnnnnnnnnnnnnnnnnnnnnnnnnnnnnnnnnnnnnnnnnnnnnnnnnnnnnnnnnnnnnnnnnnnnnnnnnnnnnnnnnnnnnnnnnnnnnnnnnnnnnnnnnnnnnnnnnnnnnnnnnnnnnnnnnnnnnnnnnnnnnnnnnnnnnnnnnnnnnnnnnnnnnnnnnnnnnnnnnnnnnnnnnnnnnnnnnnnnnnnnnnnnnnnnnnnnnnnnnnnnnnnnnnnnnnnnnnnnnnnnnnnnnnnnnnnnnnnnnnnnnnnnnnnnnnnnnnnnnnnnnnnnnnnnnnnnnnnnnnnnnnnnnnnnnnnnnnnnnnnnnnnnnnnnnnnnnnnnnnnnnnnnnnnnnnnnnnnnnnnnnnnnnnnnnnnnnnnnnnnnnnnnnnnnnnnnnnnnnnnnnnnnnnnnnnnnnnnnnnnnnnnnnnnnnnnnnnnnnnnnnnnnnnnnnnnnnnnnnnnnnnnnnnnnnnnnnnnnnnnnnnnnnnnnnnnnnnnnnnnnnnnnnnnnnnnnnnnnnnnnnnnnnnnnnnnnnnnnnnnnnnnnnnnnnnnnnnnnnnnnnnnnnnnnnnnnnnnnnnnnnnnnnnnnnnnnnnnnnnnnnnnnnnnnnnnnnnnnnnnnnnnnnnnnnnnnnnnnnnnnnnnnnnnnnnnnnnnnnnnnnnnnnnnnnnnnnnnnnnnnnnnnnnnnnnnnnnnnnnnnnnnnnnnnnnnnnnnnnnnnnnnnnnnnnnnnnnnnnnnnnnnnnnnnnnnnnnnnnnnnnnnnnnnnnnnnnnnnnnnnnnnnnnnnnnnnnnnnnnnnnnnnnnnnnnnnnnnnnnnnnnnnnnnnnnnnnnnnnnnnnnnnnnnnnnnnnnnnnnnnnnnnnnnnnnnnnnnnnnnnnnnnnnnnnnnnnnnnnnnnnnnnnnnnnnnnnnnnnnnnnnnnnnnnnnnnnnnnnnnnnnnnnnnnnnnnnnnnnnnnnnnnnnnnnnnnnnnnnnnnnnnnnnnnnnnnnnnnnnnnnnnnnnnnnnnnnnnnnnnnnnnnnnnnnnnnnnnnnnnnnnnnnnnnnnnnnnnnnnnnnnnnnnnnnnnnnnnnnnnnnnnnnnnnnnnnnnnnnnnnnnnnnnnnnnnnnnnnnnnnnnnnnnnnnnnnnnnnnnnnnnnnnnnnnnnnnnnnnnnnnnnnnnnnnnnnnnnnnnnnnnnnnnnnnnnnnnnnnnnnnnnnnnnnnnnnnnnnnnnnnnnnnnnnnnnnnnnnnnnnnnnnnnnnnnnnnnnnnnnnnnnnnnnnnnnnnnnnnnnnnnnnnnnnnnnnnnnnnnnnnnnnnnnnnnnnnnnnnnnnnnnnnnnnnnnnnnnnnnnnnnnnnnnnnnnnnnnnnnnnnnnnnnnnnnnnnnnnnnnnnnnnnnnnnnnnnnnnnnnnnnnnnnnnnnnnnnnnnnnnnnnnnnnnnnnnnnnnnnnnnnnnnnnnnnnnnnnnnnnnnnnnnnnnnnnnnnnnnnnnnnnnnnnggcgggcgcattgttgttgtggcattgatctctttccatggtgcgttcttcagaagaagtcgtccctgttgcttcggggctgaccacggtgcatcgaacacagtctcaatcgcacggtgatccgagccgtgctctgtcccatgtatctcgagatagagaggcagagggttggctacttcctacagtgcttacgcagtgcttacggggcagcttccgtgttgccttggttctggttcgcccactggagaaagggtttggggtcaagggtttgagagcagaaagagccatcggagcagcaattgcaaaggaagctcacataggtaaacgggcggtacctcaatcattataccgaaacggtggagcttatgactcactggagttcgaaataatgtagtaagggactatgcaatcgaatgggtaaaaattatggtttggagctctggaaagtgcttttctatctcataggcttgtatatacagtaacatttcaagtaacacctacacccaaccaccgtaagtgcttggcttgcagccaattccacgaaacagctcactgaaatgcgagatgggcaatggcggttcaaacaggaaactcacgcgggttggcgtgtacaatgcgtgagttgtggttttctaggaaaggtgttgcgtcaaatccgttgacattgtggagatccgctaactgtgcagcaagaggttcatctccttggggccacctgattaaaacccagtccggccttttcccgtgctgccgaagtacgaagactggcaaaatggtcttagctttgtgcgctgtgccgaaatcataatcatgatgattgatgtcgatgacaataaaggtacgttcactccacacgtctatggcaagcaagagaatgcggggatcgctttcccagtccggaaaaacctcgctgacaactgtgtttgctgaagcacgatagtcttggggatccaaactttcggttttcactttgatgacaattcgttttgcaatgtcgatttcgaggatttcttttcgtatatcagataggttggccattattactatgcaatctcgggtctggtgttcgaactgggcgatatagtatgagaaagttcagaaaagcaatttgtgaaagtcaggtagagatttggagacgaacaattattgcgtatggtaaatgaatgaagttacacgaccattcctttttatggctgggatcacttattaatacgctaatcctgaacgggtaagtaatgccggagaaacgccccttaccttaccaagggtcttgctacgtattaaggcaacctatccgatgaaggaaaatgggggtacatacaaggttagtgttgcccatagagaaagacttataatcacgtgttttcttgttacttcatacaactaaatacaagatacacgcaacctgagtctatgctaccccaatggacccatcaactgaatgtcgtcggctgactattcgcgtctcgcagcagctagtgaaaactaggtaaaactattttcggagcttgacggagaaagatatgaatgctgtgcgcatttgcctggtatccacacgatctcccaaacttgccggggatcagttgtggtaggcagacaattgcctcgatcacagggcctggctttgtcggcacggaaagggcatccgcagccttggtagtacttgtcgtcccagttgcacatctattgaaaattttagagaggtggtctatcaactaggtacaatagcttggctttaccttcgatgcaacgtattgtctaacgcgcctttgaatgacgaaagtttggtgataagcaagctggaatcggcctgggcgaaggaatgatgtggaggataataggacgggagttggagaactgtgtatgagggttgttgcggaagcagtagggaaatgcgcggtgattgcgtttttatatgcagtttcatgaggttcgctccaagactacattttggaccaaagggttgtagagggacggccctcgcaaagatgccgtaacggaacgaagcatgcagatcggagatggatgccctcatcaccaatggcaaaatgccagcagcagggaccccgttagctcggagacaaaattcgcatcccggcgaaatgagagacgcagagacatccttacgatcggagatgacacaaggctggctcatagctcagcgtggggacaaatcatcccgcaattggtggccaacaaaggagatgcatcattatgcatactaggagcatctgtattatctagagactgcgtagattgggccaatgattcagcgcaggagcttcagccaccactccatcccccccccccgggcagaaggctggtttccattgtagccaataataacggaccgaaatgccaagcccaatcaaagatctgtgcccatcgtgtccattgtgtccaccgtgtccaccgcgtccatcgtgtccaccgtgtccatcgtgtccattgtgtccaccgtgtccatcgtgtccatcgtgtccattgtgtccatcgtgtccattgtgtccaccgtgtccatcgtgtccatcgtgtccattgtgtccatcgtgtccattgtgtccaccgtgtccatcgtgtccatcgtgtccattgtgtccatcgtgtccattgtgtccaccgtgtccatcgtgtccatcgtgtccattgtgtccatcgtgtccattgtgtccaccgtgtccatcgtgtccatcgtgtccattgtgtccatcgtgtccattgtgtccaccgtgtccatcgtgtccatcgtgtccattgtgtccatcgtgtccattgtgtccaccgtgtccatcgtgtccatcgtgtccattgtgtccatcgtgtccattgtgtccaccgtgtccatcgtgtccatcgtgtccattgtgtccatcgtgtccattgtgtccaccgtgtccatcgtgtccatcgtgtccattgtgtccatcgtgtccattgtgtccaccgtgtccatcgtgtccatcgtgtccattgtgtccatcgtgtccattgtgtccaccgtgtccatcgtgtccatcgtgtccattgtgtccatcgtgtccattgtgtccaccgtgtccatcgtgtccatcgtgtccattgtgtccatcgtgtccattgtgtccaccgtgtccatcgtgtccatccgaagatcgccatgatggagacttagtctctgaaatctggactcttgagtacgttgctaaagactgtatcaaatcccgcattgacctccgtcgaaaagtaaatccatctgatcgacctcacgcaggaaacaaccattcagtagcaagtctgaatccggagaaccatagccaacgatgacatccgcggtaccatacgagaatttgtacgtttcaggggtatatagtcttgtgtattgataacagcctcgataatgcggacaatccaccacgcttggtgtggagttggccttgaaattggatgggcataactaatggtgagaacaggggtagtaatgggacattggtacgattcaaacgatatataatcttgcatatctataagatctcggcatcgtaggtccttcaattgagtgctgtgctgttttcaaagtgtccctgcggagttcaatactttccctgtctctcaaaatcaaagtcttgtgcgaaatatgggtatatcaaataccctctggtctcgttttatcgaactctttggacgctgcagggcgaggaagcagtcacaggaaggccttcaaggtttggatgcgtttttgacaagttagactgcaacataataaccgttgatccagaagtggtgtatcagtgttcggcaccgcatcgtggaacttccgtcaaattgatctctgcagaagaactggacgagcttgcagtgagtgtcccggaactgttgcattcagtcatcttccaatccatggctctaacgtataataaatagaaacaaccatctagttcggacttcaatgtcggtaatctgcgcatacgcatacttggacaactggtagatagcagaagtaccaatgtttaccatatgcagcgcgaaatcaggaaaacggaggagatcccgggcacaaaggatcttatgcaggagttgtggtttgagcactactgggcctcgcagacagagctgattaaatcttcgattggacgtgatctcctgcaagacgaggcctccaaaggagttagcgagcccttgcctgaagatcacgctttcaattattcctcattcgcccagcttctccataccctagatagtgccatcatgcagttaatctgaattatatggccgatgaatcagagcggctgtaaactagaacctatgctggaaggataattaagccaaggccacagtcggtcgaggctgagggctttggtattataatcttgatcaaattctacttgcatccccaccgctagttctatccagcaattgcatctactagtcttttggatctgtggagatgcgttggcgagccagccctcacctataaagcctgagtcttcgtcgaactgacagccttctgtttcctgttctgaacaaactatttcatttattagcttctattcactttacttcaagatgtctgacatggaaggcggctcgcaatcttgatgcaagctctggtaaaaacgggattggactatatttgtccgggatgttttaagctcttttcagatccaaatgcttgctacagtcattgtcgaaaggaaggggatgaaggggatgatatccacaaaggtcttggtctgatcacgaagaaagattttccgaaattccttcgatgctaccgggttgctattggcttccagatagaagaaagagctcttcccttgggagagggcccaggacgccgctcataccacgaatgtttctctgttgagtttgtacttaacaattgtggtcagtcttttcacccaaacgcaagccctatgtgtcgaactgacgataaaacagtcgcaaaaagagaaataatcgacgcaatgcggttggccgtgattaagatctaaatcaacatcccattgggttagataaagtcatggtagtgcgttgcagaggaaactcgtcgaccgacggcaaactaacatcgcaatttagataccgacagaaagctttcaatttgaccccctcatccaacggcagtctttgacagctggggggcaggagaagagcaaaggaaacgggcttggcgaaaaaccagttggaggcgtggtataagattcagtgatttgaagttggattggacagttgtatatatacccgtctttattatttcccattgactagtatgatgcggataggccaagagatggtcaaaactaggtatacaagaccccgtcgcctatgatcacgtgtcgttctaatagccgtaatagtcccctcaatctttccttgaagtttgccaacgtgtccggttcacacattttcgtgtagctgaggtggatggatcggcacactgtgtcaaattgctcgtcaaagttggcgaagaattgaaggagcccctggggtagaggcaccattttcgagctaaaatgccaggcgagaagagaaagcatagccaaatcacaatcagcgagttcacctgccatacggtgggcatagttcctcagccgtctgttcttggccaaggctctgcgttttccccagggcaagtagcgatactttctgagtgcctggcaggaggatatcaagaatgtggtcctgtcattgagcttgtgctgtcgtttgattgcgcgcttgaggtatttcgagcccagaaaccacacttgttgaacaattaaagtcgtttcggcggctcggaaactggttcttgggaaaggaaacttcatagtttagcatatcactgtatataatccagtgattgtcttacatagaagtcttcaactagcgacatgatagcaggtgcttgggattctgttggaatactggagcatggttccggtgtaagatgggctggtccagtatttgtgttatgcccgagatgctcccgggtcccttgatccagattccggacgaataagaagaggttatttcctggatgcgacattggtcttctaatagtagtatcgccataccacagacgctaacaggaggctttcccggcctattaagagcaagtattttggcccactcccaaatacaaagcctttctaaaagttgaaatttccgttttactgaaaaataatgtaaacttagcgccattgggcagccggaatacttctagcccttcataccatgtgttatctgcgtccgcctggagcggatcgatgctagttcagggccactgtggagatcaattatatgcagctttcattggataactgactgagtgcccgagaactgcatgccgatctcggttatagggataattttctccattgcatttctttttgcgccatttcgaattaccaagaaatgacccttcttacttggtccctgcacatgggggttctcggagtgcccgagtgcattgcttagaaaggatgttttatttgtgccagggcgttccccaaactccagctcttcaactccctcgtacagtaccgtccattgcatacattgcatccctttcagtcacccgcaatggactttcgaccaatcttccaacatttttctcatagtgagtaaacttatcatcctgtcaacttcgatactgataggcctgaagccatagtcttgaatgacccaagagggtattctatgacaccttgcctcagtattctggcagcatgtagagagagatatggtcagcttgaaaccggcgcactctcacctgcctacatttacctggtcatgatcgaaaattcgacctactatacaatgaacggagaattgggtcagcttcttcggcgattattgtatgatcatcttcaagaagagtggctcaaagaaactgatatgggccgtttcattcatgttactctagcggtcaaaagagaagtgcttattcggtgtgatatattttatgacatgcgcggctatacctcagtagccgggaatgtggaggggactgtcctcgccgaaagagccattctggagacgtttcagcctatcttcgactctgatctggctatcggagcgtgggtgattgagttctctttttccgacttccggccgagggtctctcggataggttcacttgaggatttgtgttcgatatttcgccctgtatgttaaattttgtcctcgattgacaggacatttaagaattgatatacatggatttgagcgtgctcacagcatagatgcgagcttttgtatagaggcatgatctttttattagctgcatgcttgaagttctggagacagctaaaatagcacacctacactacccatgtgtacttgctttctccagttgttagtgtcagtatacgagttaactttctaatgtctttatgataagagttaggtatgaagcaagccttggttatgtattagcagtgatcctaatgcatgtgtttgttcggatcgggcaaggtcaagcaatggagaaggggaatggagaatgacattattgaggtaacagggtgagatttgctatggtggctaacgtagagcagcattaggtgtatatacatactggtaagaacgaaaagaaatactccattgagcagctattgacagattgctgcaacgatgataacataatccgacgatttaaatatacaagaccatttcccctcaaacacataatgttccacaagccctagtagcctgataaaccttctcttgaagctctttacagactccggttcggccattgtcgtgtatcggcgatgaatatcagtgcaaacatcttcgaagattttcgaaggctcgtcgaagaatagaagaagctgacggggaagaggcacactaaaatctgcgttgaaatgccaggtgagaagtgcgaatattttcagagagtcgtcggtgaggtcttccaccatggcttgcacaagccgattcaaaatgctgttctgggctaaacgtttccgtcccttcctgtatccattcttcctgagatgctggcaggctaccactagcgatgcaatctcaggatcgagatcgtgttgccatttaactgcatttgccaggtccggggtacccagcgaccagatttgcaacgcttttaatgatgtttgggctgatatcttgaggtcggcttcgaaatctgtataatcaatcttaataatcaatcttagtacgggaatagaacgaagccatttgcccttaccatagtttccgtgataaaggcagacggtggaggactgggcaggtgtgtgcacaatcgaagggacaaaccacttgcatggggatctcccatgtatattagggttttggagtgggtgtgatatacctcggcgcacggacgcgaatattacaatacctttcaattaaatggtaattttcattttttgactgcgcttgtaatgagacggacgtgccctacttagtattagtagttcatgaatgctccatacccgacgtagcgaagtgtcctagcagccaatcccacctattccttgtgtaaacatccttgtaataacgccccttgccttctttgcaaatttttaccagctactctcatgggatttacaaattaataagtgacccagaacgagctagccctcagtaggcaagcatcacaagtttccccgcccaacaccgcggagcatgaaaggctctcataagcaagggagcgggggttcccctttacatcgtatataacccccatcgccgcttgatcttcggccagataagaccgactctctttattcctagttgcccccgaatcatcccaacttcaattctttggaccatggcgattaacaatggccactggcttccctgcctggatccacaaccttccaactcccttgcccctggaccaagtcccccgtcatatccgcttagtaggagtatcattaaacatccattcgggacaggtatgtccagcactgtctgggtccaagttcctcaaacccaagttacagggatataaatgatgctaatttgcaataagaaaggggtatggctgatcaatcttatgttcaggccaactgctttgaaccacagccagcctcgccccaggcggaagcacatgtcggttttcattctcatggcaaagcaataatttcccaaaacatagacgaatacgccctcatcaaccataccattgggttccatggccaggaagcatttagcaatatgcagaagtcatacaagagggtggccatgccaagccaagctgtgcaccagagcttgaagtgaggaaatattattattttccgtgatgaatatttatgctgatatatgagtttgtgtaggacacaaaagcataatggtcccaatagttgtgtgccccttcaattcagcagcctccccgcgaacgacaatacggcgcgagggcttttatcaactaagagcccgctgccttctactcattgcaaaagaatcttccccgttgagtctgacttcttattgattgaccaatttgtggctagaaacaatccagccctggaaaacatactttcaaatctcaagcgttgcgatgcagctctcctggagagcttctatcgatctgccttcgaagggttggacccggacacatgtgaagctattttgcatctatggatgagagctttgagcccaaaggccttggttgggatccaaaacacatatttgagggaactgacgtatcctggtttgtgcttccaaaaacccattacccttacccggactgaccattgaagatacacgagaggttctctgtcatatattgcgcggatgccctggagaggaaatcccttttaaacggcttctggagacactacgcttggttagtatcgaaggcaagaaaagagtggaggttgaaacgcgtttactcctgcgtgagattgaagtttggagagagttataccagtaaccattttacggcgctcgcttgatagttacgttttactgagagatcctgtatatttgtatctcaccatgtatagctgaatgggtgctacctatcagtgacggttttgacaaaatgaatcgtggccgtatacattaagattatattcagaaatatgtagtttcaaatgttgacgaggatattggcgcaattccaccattctgttatatacctggggatcttataaagtagaccaaagcaagacaaaaacagctacgtgtatttttgttatccattaaccatactctctccttccacagaaatctcgcaagaacgtagcttcatccatatcaccattgatcaaaaatggtcgatggcttccgtaatcacggtagaccacggtttcgctcgtaggacctgcacttccgacgagaaacagtcacatgcttgtaccgccaaatgtgcagtttttgaaggtatacgtcgtctggggcttgcgatcgacagcctttctcttttcgcgacagccgatgatgtctggtgcaagtcaatatccaagccacatatatagaatgcgcgtcatgggtacctgggtgtctcaattcgtcggaaccggaaagcagatggggtttcgtgctgtgcgaggtgcaggtcacgcgtaatgaattagccacagattatttggagatggaagggctctcgctgggaccttatgtacctggctcgcaaaattcctcttgatgtcgaaattggcatagggttgacctggaatgggccttgtatattgattagcaaaaaagtgcaacaggagtctttaggaaacagttctaagcacgagggtatcataccgtagcaatcttctctggatgtgactggatacttcaccatcgaggcattgcctggattggggttgacttgtgattttgcattctgaggcccgccttatagccatttaatggtcatgctgaaagtaggtgagactgaatagagaaaagtcagaagtgcttaggaaacagggctcgttgaactgatcactaggcaaatgggatgatgaagagagaacagaatgtgatggggaatgtatcgactcacggccatgggtaaatttcccctggtaataatgcttaggtatggcttcgtaatttatatgcttaaaattcgataataacgctccgtgggtccctgtatgaaagtgtctaccattcacaaacgcaccatgcaactagatgcggaacgggctgtaaaattgctgcgtgggccctggtaatgaggttcaaccattgaaaaagacctgctcatgcaaccgacaactaggccaaggttcagcccaaggtgctgaggccagttgcggctacctcggaccacctctttcagacaagatcaaacttagtcctacgctacctccgaatagaaattctcgcataacgctagcccaccttcatatttttaatagcatgggtctatcctattttcctccccggcaatgccgaaccatcatctttgttcttacacgctatcaacaccatgcatggttgagaatcccttgaagcagaagcagctctttcactaatatacttgaagtgcgggcgtcccgttaaaggagcctccactccggatcaacatgagcactcgagatctgttctgttttgagcatatgagttacaccagctcgccgcaatatccttcggggtctcctgtgggaatggtcgacagatgttttgagactggatctgaaaacaacgtcgtcgacgaaggacctcctccagcaccacttgcgctctctacgtattccacacccccgcttcctcccaaataccgcacgatcaagcctcgattcagtgatggcggcttaatgcccaaaccccccgatgacacgttggaagttaagcctcggagacatcgaaggagtggaacgcgccggaatcgccaacggcagcaacaagagaaaattggagagcctaatccagtccaacccgaggcggaagccagcatggtctcttttactagacccaggagcgagaggtttgaactgccaaatcatctgaaactgccatagatcctaaggctaactcaacgactataaaatttcagttttgtacccgtcacccaatatacggattccgacctgttctcgaggagtcaaggaccttctctcgcaccttttttattctcacattagaacgatcttacaagcccggcggaaattcgatcgcctttattccctaatattgcttccgcagctcttgtcgtcgaccgtccagcctatcaccatgatgtgcccagctcccttgattcgtcggacattcaggtttcaaggccgaattccttctttgagctaagccaggatcgagattctatgagagcagcttctcttcaattctcggagcatcttgaaaagaccaaagttctgcaatcgttgagcattttacaggattatatggcgaagtatccttcggtctttgaaaaacaagcccctgagatggtccagaaatggatgttggacattgaaggcgttaaaccaccagggtctttgtccgaatgaacaaaaaagcggaaacattgatgttctcgtcctaggttgcatgaaagatatataatttaacaagttgctcttagaggccctaagatgccaccttcgtacgttcataagtgagacaataaaaaatttgctttgcctttgtaccaatcccagcaggataagttccctgcatgaatgcagattaccaaatattttgcccttttaggctgaatgaagatgactgtatatgaaacatgtcgatgagccttaggtggtcataattatctccatagccaaaaacaacggaataacgatagtgaatgaaaggagaaatgacatcctgcattaaaaacccgttcattttatatccggggggcatacgcaatattaaagaaactagtgaggcctggctgatgctactgcagcatcatcacagccaagctagcacttatcttttgtagcagtgttcagacctatccctgaagcaaagctgaaggctcgtggcccgacaatcagggtcagccgcatgacacgtctgaaattttcattctagcacactgcatggcaggggctatgttcccaggaatgaacatctagacccaaagccactgtaggctgccgtcatagaaagtctcaaccaataacttcgttgtgaccaatccagaatattacgtgtcccaagggggctagttcaacctgacctggtatcgatcatcacaataagacatccagggtggataggccttttctaatcaatagtggaagttttatataaaatccactctaatggttctaccacatcatgaattgcagttaaagacatttgttatcctagcctaatcattactttgaggcaatatcgaatctctggtatggcttcttgttttgctgaacaacaggattcgaagagtgcgagctaaatttcctcaggacggatattcacttcaaatccttcttcaaggacggctaaaacaagtttcattccaggcttggctcctgggaactatcgaaaacccaaccttggtaccaaatgggttcacgctcgctgtcttccgaatttcaaggtgagttgacgactaaggattttgaccaaattttcatacttatcatcgaagcacaatacgcaaggattgtagaatgtgagagaaagtgccagtggcttgagcaaagccgagccccatccacagtacacctgcctagtgaccgatggtggggccttatcaccctacacttgagtttgcttcacgagcatgaacaattcttcgtcatgtgccagcatccatccgtcagcctggatgtcaagaatgttcctaaaaaatatgagatgtctgatcgtatgtggcggtatgggatctattcgttgttgaatatcctacgacaaagcctcccagggtctttgaagtacatgctctgcttcatcgaaacggtctcttcgattctgaaacggttgattctgtcgaattcagagcttggggactcgttgttcgaacaactgggcgatgtggctcgatatggtatgtttgcggagaagttgaatagggaatattggaacgttatatcgcggtgttggtaccaaaaggctgcggaccgaaatcccgatagcggacgaatccaacatcatcttggggtcttgtcacaacctgatccgcttcagacactctttttccttaccaaagctctcatcagtgcgcagccatttccaggcagccgggtgaccgttggccgtttcttcaatgactggcccaatttggcacttcaagaaaattccatggccacctactttatcgccgcacattacgtgctacttcgtggcgactccactgggcggtttatgacttttataaatggattcttgtcgctcttaccatcgtacatggaacaccatggtcaccaaagacaacacacagtgtacgtcatgtcctgcaatttcgcctctgtattcggttaccacaatcctgcattcatggctgtgggatcttcccaaagccagagtggacatacttcccagacaaatgaatcgggtccagccaaccagaagcaagcatgtgtaagcaattgttcgatcaaccaacctgcatatccaactaaacaagccctacagggagtccatcttacttttcggacactctcggtccttcttcagtatagtaacggtcacaactcagtcccagcaatccatgtctctctagcctttctctggggcctcacctgtcatcaccctttcatggagagtttggaggcgagggttccttggagagcaatcactagattcctcaatagtctgatcacacccaacgatgattttccgaagatcgaagacgcgtcgttcccagctgcagacgatggagcagctctacagcttccagaagatttcttgatacggggccaaacttggagtcaattatattacccaaaggggtttttcaatggatcaggcgacagtatttcgattgaagtggacagtgaggtgaagataagaagatacaggtgcctctggctaggtgtgcaattagcaatggtaggttttcatgacttgaattgtatctacttcacggccacggacgaaatggtgctaatgaattatatagtccggtccttggatctcttacattcctacaaagggattcaattgcacttgctagtaaatatgttagcagacagtcatagctattacagagcaccctgaagctgagataaaggcaaactaattgggatgaccccacgttgcccttcattcccgccggaggacatttaggaaaccactataaatggcccattgttcgaagacaaattgagtttttatcgttctccccgttgtactatgatagatagtagattttagaggaagacagccttgcatatagcgtgtatatgagataacactcgccgagcatagataaaaatgtgatagagatagaaaactcgggaatttgtagcatcttagtcggcgggtttcttattatttacgcaagcataatacctgtctttccttgccaattacatactaaaggtatttcgtcggacaatattaactcaacgcagccgattgctacgcactgaagactggtcacggttagatcagaagggatccgggtccactggccttacactcctcatgtttcaacgtcaagatctgtctctcaattgtattgttaccaaacaggccttactgcaggtcctttagtatatcgaagaatggtgccagtagagctctgaatagatgtgtaccaagctattggtctatagtatgaaagaatcatgccgaacaatgacaaagtaacagcgcaatactccaacagataaccatacgaacagctgaatttctcatctcgtaacaggtgttggcacatggagcactggataagatcgcacggatacaagactaaagttcgggcgctttatatggaaggctcagaacagggacggttccatgcgtcaaagtaaataccagatatacaagaccgcatcgcctttgatcacgtgccattctggaaaccctaataatcggctcaaatttctttgaaagtccgccagcttgagtggtactatctaaagtcagccaaagttgagtatttcatgcgaaattatgtttccatgatatattccctgaaagcataaatgagcagcgcagttgtatctgacgctcaggggttattacttaaaagtagccctttcctgtgacattcctacatatccaaatgtcagacaaatagatcacacaggcgcgtaacttctttcaatcccctttcgcaggatcctcacaatcaccgagacttgctctacaataacccaaagcttggcgtgccatgaatttgtagcacgctcagtgactgagatttcaaatccgacatcatgcaaaccaggctatgtccaatttcattggggtcttgccaccaaattagaggatcctgggccattttggtaggcgagaaagtataaggtgcagacagcacatgcggctatttatgaagtggctcacccgtacgatggtaatacatttgctgcgccaaggatgggagcggagggccttggtaccgttcggcaccgcctccctgcaacatgtgaagcggatagtgaagaagacaggttgggctgctcaggaaggacgctgagactgatattggaacaattgcttcgggcctcatgtcaggatacgcgggaccactagtatggggtgtgaacaaaccgcctgtgtgagcgcttcctgacacaccgctagtttaagaagccccggattgggaattgggcctgcagaaatgggatggtctggtgtttgcaacttgggagttgggcgggcaatttgggtccgggttttgtatgtaagtgagctgggagttgtttttgggtgggatatcgacgtctcgcttttgagactgcgatgtgttctgcaaatctgtgcgcattcccagttgtgcaatgttggcatctgaaacatcaaattggcagtgaccgctggttctcagcttcttctgatgttccggctgaccgctttgagttatttgagaacctgccagttcgtgctcaggggtaagctgattggggtgcccttttcacctgcaagtgcaaatgaaagcagtcagcgtgggaagcaaagaaaaaaaaaagaaaaaaaaaagtggctgaaaaaggtcaggtaacacatagatctgattatcttgaaagaggctagtgactatggcggacactgcattagaggtgagcttactctggaacccttctttctgtgacacattttagccatctctcctctgcccgacacacttttcttttgatgctcgctggcctccttgcccattaggtagagcgtctcgctcattggtctccggctgagcagttgaatttggatcagcgggatgaacgttcccgccattgattgctgtgaacctggatgcaggttttggcgtgatttcaactcggtggcgccgatttcccaacgtgggggtatcttcggcgctgtcgggtgtccaacataccatctgtccggaagcggattcgggggcaacggcagccggtgaactttgatccactgtttcgtcgctctcatgtaacggtggagccatatcgcgagaaaatctgtctatgttgcctaggatctgtggctgagtaaggtgtcgcgatctagatcgctccagcggtggaggcttgagtgtagtattctcattgctcggtactgctgcagtatgcgatgaatgcaagctgggagtgtcggacccaatgatggcgttgggtggtcgtgataccggcatagtattgagaacgggagcaagcggagttagtcgacctggagtgggggctgaggttacatccttatggcgagaatctgcctttctctttctgcgacaagctgtaacgatagcagaagatgatcgatagtggccaaagtctctcagaaactcaacttcaagtctctcctttggtaggtttttccgtttcatgtgccaccctagtaaacggttcaggtccttatggttccaattgggatgagaacgcgccgcctgtgatttagacttctcatggagacatcttataatcaattcttcgtcaatgaaagcactttcagaggcatcaatggttggctcatccattccgcagttttgagggtgatgctcagtggagttaccagtggagcttggttcaggaacttggaagggcgttggtgacctgggcacactttctgtgtggctttcatcattgaaacccacattttctgaacctctagtcaatgaattttcgcgtgatgaagattgcggagaaagcgtctctaatgattggttgccatgtgccgtgtctgcctgctccatgtgcattgtactggtctcagcgcaacaggaaagcgtttggcctagccattcgagtgtgatatcgtcttcagggggatgccggattggagattggataggctctgatatccgagggggttctaagggagagcttcgtggcaagcaagcatcacccatctttgatattgcggcgaagacattggttggattaccattccttagctgactttcgcccaccaggtctgagaaacctggatgggctttaggcgattcttccgcctggcggcttcctcgaactggcgactcattttgacttgtacctgactgaggttcacgctcctgaggggcgcgctggcaacttaacatttgattcgcagtatcctgttcaggtactgcatgtagatcgctggtttctgtttcagggtcaaccggttgaacaccatgaaggccgtaagaatctccatcctcgcagtcttcagaattcagatatggaagcaggttcggggctaaacgcaaaatgtgaacctcgaagttcgacctcgagatcatttgttgggtggaatccactgatccagaggcttgaaccgctggtggggaggagcgtggtgtcgaagacacaggtcctttgcgcaaagtcttcttattgcgcttcctaaaaggacttttaccagttaggaaatacactcttgcctcaatagcatggaaagtccttttttgtttgaatgttccgtgaaagttgcgtgcaatctcttcatgcgactgattcttccgtacttggtcttcgaaccatagaggaagccgcttcaatacttctgcaggccaagccttgtttttgagaactagtacatccaaattattagtacatttcttcaacctcttcagtctcaatgccacgtttcttatgtgtattactcacagttccgggttccagcaccgcgttttgaagcactggcttgcgcgtctgtcctttgagtctcgatagccatcccctcgagcgaaccagtgtcaaactgcggtggcgtagttattgctggctcttcggctgatcccaggggaaagggcgagcccgccgatctttgaccttgctccggattgcggcgaagaaatcgatcccttcttagtatctcctcaagcacagtgttattggctttgatgactgcgaggtgacgtaagcgagtgaatagggtaaatataatgtttgagtgggcttaccgtccgatgcaagttggttcacccgtgatgccatttcggctgccagcgccaaggtatttagttctatttgtacgtccctttcgtaggaccatggttaaatcagctttcgaggtaaccctgaaaggatcatgttgtgttggaaagcagacaactggacaatcacgccccggtctcgcatatggaaatggtaaattccattccctttgtattcagcctcataatttctttccttgacaacatcaagccagttgatattggcactggcttcgtcgttgtggagctgaagtacacaagacttcggtgcttcaaacatcacttctattgtcttcactagggcgtcgcttatgaggggaacgttcaagaacccagcaaagctctctcgccccgctaggggccctgaaatgtgaccgagaatgctgaaggaccaaagacagcttatcttgaaaaggcttaaaatgctcagaatacacgcttttcatttctggcagacagttcagtatgcagtcatcttccctaatgttgcggccagagccttcaacagtgacagcgttggtaaccatctggaatgtgactcgatctgagtaaaatcagttggaaacctgtgggcacatagagtaagaacaaattgccgaagactgccgtgtaatcgaggacacacgtagcaatgtgacgacgtttcatgaaaaggagattgtgatgtccggatgctacgcagaggccccgacagcgctagttataaatccatttgttgacatcacgtgtgtggacacttagataatttatcatctgcccagtagagtatatattaccactatattaattggggggcggtttttttttattttttcttcccctccgctccgtggatcgtgttcaaacaacaataatgggtggtaggtcatattcctgcgtgtctaacatgatgccttggccggagtaaagtacacttttagtgggaagctcgaatcccgaatctgacccgtttgaagcgggatacactaatcgtacctgcgtccaaatggttatcaaagtagaattttagtgcgggtggttttcttgcattatctcgcatccaattcagagaaaggagatgggagttactgattgagcggggatccgagaataggtctccggccccacctcccgttttgctttctgttcagactagaacggaataaaatacagagtctagccaatgagactaccgccgccaagtgcggttgggaaatctgggtttttacacggatgcggctagtgatgggcgcgttaggtacagacgtcgtagatcaaaacacgtcattactcccaccgttcatgctcgtgagacttaaaaggccgtgcattgatcaccagagccggataatcccgcaatcctctcagtgttgactccgctttgaaatcgtaaatcaagcccgcctgagacagaaggtcaataataacccgaatatacccatgatataacagccatattgtgtggaacctcattgtttgtactcacatgagcgtctggataatttttggttgtgttcaacacgagaggatcattattctgctaatagccatatttgagatttggttgactaaaaatgatagcaaatgttgccgtttgatcaccccgtatatttttgttacgaattttgaagaatagttgcgtaccgcagatttcaagggttaatgaaagctgttcacagtaatcctacacgtaccaggcaaaggcccgtctttttctttgctggcagctggttcgtctaatgcgcagaatgttcctgatttggggtttgtctgtgattagggaaagagtgcttgcgttgaacaaatggtggaatcaccaagcctgatgaccagcataatccgattaatcatcgataactagttcagattttggccgctcttcttgaccactcctcttaaccactcctcttgaccactcttcttaaccactcctcttgaccactcttcttaaccactcttcctaaccactcttcttaaccactcttcttaaccactcttcttaaccactcttcttaaccacccttttcttaaccacccttttcttaaccactttttggtagaatcaagatcgcactctgtctaccaaatgtaattactgctttgaggtgactcagcatgcaccacaccacacctcatggggacatatcctacttcagagttcttttctgtacaagtacagtggaagaatttttaactcttccgatgcattgaaataaaactaaaccaaagcgcgtattggtggacagggttggctacgtcaatattgagtgataaacaattatctaggaacattgattcggttgaaatcacactttttacgtctaaaatgtcaaaaactcgtcttgtgggtgcatagagtaaagctcaagatgagattctatgcgcaaaccaagaaaataagatagtaaataagttctgtgcatgtcttagcttcctcgatatcgacgtatgatgatcgagtattggtccctggcaccacggagaggtgctgcacgccgccagagggagcacaaactttacctcacggggctcagggcaatgagggagcacaaaatttacctcacggggctcatggcagtgagggagggcaggaagcctgctcctactctccaaagtgggcgcgtagggcttttttatccgttcccactacgagactcgataagtaccattaacgcaaccccagcctcgtgggaatgctatagtatggacgcgcagtgaagatgatgatgtactcaaagttatgaggtaaatgatttcacagtggtcagccaagttcgtgatgggtggatcccagaccgataggtatccactgactaaaagtcgggcatgtgaatcaaacgttagactgccctcataaacatcttcgatggcctaagatgacctgttcaaatggttatctcgaagtcaacttgctacaacaattgcgtgttttgttgaattacctagtatattaatggcgtattgccccgattccccgatgcaacgatttctgggcgtgtgttgattcttcctttacctaagctggctaatgcaaacaaaataaggaacggcccatgaggatttatcctgtactgccctttacgtttccaattttcattgttatctgtttttgattttttttttttttttttttttttttttttttctttttttcttttttgccgcgccggggcccctttagtgcctgcagtagtgcgaatccaccacgcgcacgaaatggcgcattcttccacccacgttcctctctttccccgacctcctcctcgttctccctattctgaagtttcctggattttgtcacgttttttcaatgtcgtacgcccaaattctacgatccagtcgtcaaccaggtggttacgaagcacaaatcgcaagcttgatgcctccagaggaagagcaacaacaaacaagaataacaccgtttcacctcaaaggaaatcctgatctaggatcccgtgccaagtatgagaaaggtaccatcatttgtggtcaaggcccacgcacaggatgaatggtggctgaattgaagttcacagcagcacagcaatcttcgcggtcaacccagcaaaaccaagagtgagctcctaccgtacattacagtggctggccttttgtgctgactttgagattgacagccttcataagcgagtcaagtgagttccacagccttcttagtagtttggcagatccctactgcggtaccttgctggagtcggagcctgctttccaagtgagcaaatcaacatgctaaccagacttataggaaaatcgaacactttatcaatggcattactcagaatggctttgccgacgtattgaccgaaaacgcgacattactgagcgaaaccacagctctcaaagacaagatccaagaattagaggaaacactggagaacatgcaagctcgtgtagatgaattgtgcaaggaaaggcaggtttctaccgtccagaacaacccagcacgcaagaaacgggcaatgccacaatgaccttgctcattggctctctattagaaaggcgctgctctcacctccacttatgatttatattcaagatagctctttgaatatattgttctgtgaaatttccgggacagttggcaacactgtcgccagccaagacgaaaatgctgccaccactggtgaaatgtaaagaattatttttttaaagtacttttctaaagtaggcattgattattaccagttcatgtctgatcttcagtcattttattcggcgaggaggcacacggacagtggggctctgccaatgtgaaccatggagctgcttgtgccctgtgcgcggcggttgctgatacttgagttaacatcattatcgtcgtaacacaatgccgtgactagcaaatatgtctaggttcaggtatttgggacaacatgggaatcacgctacgttttcttcggcggccaatatagatcgatctcaaacaggacgaccgatgaaaagccagatacccagtgtcaatattagttatatatacagagataccttggaacatgcaaggtggatgatagagccatctccattgagttgtacatagaagtggtaaacattgagaatcataagatctcagcattccgtgacgctctcatagcagctgccatacggtgtacaaacttccagtggtacgaaatatgtcgcgagggtgcggacctcagagtgtgtggcggtcggatcgtataacctatcgaatcattagccgtcctgacccatcgccaaggctgccgctatatcttacctggtagtctctcgtttgcgttatccgagtcattcgtcaggtggcggcgttctgaaacagccagctgctctaacgcatggatcaaaaggcgagtttttgtgcgggagcctctaggtgcgtagattggaagcgacggcaagcaggacatccgagcttcttcgcgttggactcgtaacgaaactgcccccgagctggtggtctcagacagacttttctggatggagcgatattcccgtaacaggtagttttgtttgcaccttaatacctcgcccgttcgtttcacgccgaactgcctgaggtatgccctggacctttccttccaagacatccttcggtgccgatgcaaccaggaaaggaggttccttttctcccatgaagtccaggcgaccttgtttgttttagacatcctggttctaggcatttttatgacaggtaagccacagaattaggatggtagtgaaaggcgagatggtgcaaagatcggatgcagtaaaaattgtgaaggaagtcggttgaacttgggggtgtcacacgtttatctaggacgggaaagttctaaagcggtcttgattaattgcggtcttctgttacagctatgagtgcgggcttgctcgacaagaccctagtcgaatagttctccaccagatgcatcctgaccctggtcgatctttggcctctgtgtagattccgagggagaatagtgactgcgaatgaggaaagtgttgtatgatgctgttaccaggttgttcataggctgttctatttggcggaagaggcctgcagttttgtgaggtcaaagtggtcgtttgtcagtacactacaccggttgagaaacggtcgatatccgaggttatctgccgccttcgggataattattacgcccagtcatactacggttaatggtaaaatataaataaacgtaataaacggtggtatatagttaaacagacgcaaaacaaaaatggatatgaatataataataaaataaaacgataaaatttaaatccggtggggcgtggcacttggggaaaggatagccatattcaacggccatgtcacctgctaaacttaccgtttctcttttcttttttttttttttttttccctagaggtacattcggagcttgacatttgtgagtggaaatggatgaaattactcaaaccttattaatttgtaatatagggagatactgagttcaggtcctcattgctaggcttgtttgggtacggtcacttttcacttcgaatctttaagggatcaaattctcccttttcctaccaccctccattctttatttcacagtttctccccgaaccccctgcttgactccaagacagttgcaatgggtgaccggagaaattcgcagcggtatgtagaccgaatgtctcaattgctttcatcgggctcaccggagccaaacaatatttggagcccccccacgtcaatcgccggctctgtagacgatgattgccattcccaacagactgatgaatccgacgacgatagcaaggctgccttcatggatagatgcagtgatgaggagggaactcagggacatcaggccaaggaacagacaaaggaacgggtcttgggtggagccagatccgtaaagtttttgaatcctgagtattccgcagagtcaattgtgaaaatgatcgaatgtgtggcagagtgagtctgaatctgttgtcttatgagatatcgcatactaacggcttgattatagattagatgggcgggtgcagtaggtttcccttggagacaggaccagaatcccaacactgacacacttcagatctgatgcgaagtcgctcaagggccaggaccggtggaaccagggaatgcagcgaaagtatatagatatgattggttctataaacacgttgactaaagaagtggctacattgaggaaacaagtggacgttttgtcgagcagagatgcagtcaaaactcgagaggccgtgggctcgaagcgtcaaaagcagtgagacaataccactatattccatagagacctaaaacgaattatcaagaactttgttttcacgtgaaataatcctttggccttctcctagcggttacagaggtcacatgtcgccttcgatcaagttccgcgccagaaccgcaatttgtgacgtaccatgataacgatttatcaccgtgggtggggttcagtactgtagttgatcgctaataatcgcagacagataattatgaccgcgatgctcatttagacattgatggcgtggtctgtaggaaaggtctacgatttgttcggggaaagctcagtcgtacccggatcgaatcaacctgactcggttttcttggcgtatccaccgttccctgcagatccacgcacgaagggtaattttatcattttcatcaatcaagccaatcatgtcccggagccacaatgtcgcggggttctacggcaaatcagagcgcgtctgtcattaaattttttttaccccaaaactattaccacttactcccaatgctccgccaaatttcgtcgcttgttttcataggattgatccgcgcttccgtcaactccatttcgcttgcgctgcgatgagcatttggccgttgtggggtcttttgattaaatcaactcgaaggcggaccgcaggtcaatatgtaagtccaaaagggcctagctcttctcatgagaaaagcatacgattacaaaatagtctcggccattgattcgtcccaaccgtttattattacccgatcagcgttagccagaggatccgagctagcatcaaaattagccatagccatgcgtgccgaggtttccgcgctaggcaggggttgaattccaaatccattagcgcaatcaatagtataacccccgtatctcttgttcacagcccttaagactggaaggcgtgatggatgaagtcagtatatcagtggtagatccagaagatcatgtcacatggactgtgcgctatgcatgccatgggacgtaagaagctcacgtcccgtcccgacaagggccgggctgcggcccggtttcgatcgctttgttttttggcgcagtgaggaactagtccaaatgtggttagaaacaagtggttgaaaaaaaaataataaatagaataatacctaacccaggaagtattgacggagacatgcacgacgtaccaatatgcgtcaacccaatctttcaagtgtccttaattccccagtgccattctaatgtcacctcttatgtggaggataatccacgaacagcacccagggaactgaaggctacctggcctgatgaaatcagcggtgttcaatccagtctgaaccacggtcgcatgcagatcacccggcttatacgcaattggaaaagatacgtttagagtgcaaaaagcgttgcgatttgcccggggaaagctcaatgtgctccaccatactgcggatcgggccctggtttggtttccggagggttcccctgaatccgatggccaaaattgcgtcaattgttctatatcgggcagggacatactgagacggagtacattctgaaaatcctatttccttcaatcaactgagcaatttcaaattaccatattcatattattatcgcataacaggcggctatagtctcacctagtagcatccctcaatcgagataacctccacacaagctctccaacgtcccgccattggcttcaaaaggacgatttgcggatcttccaggtcggcgcaaagtgctgatcaatgaccggctctgatcggctcataaatctgcccaagcacaatggcagtagttcagcgagatcgtgacacttggactacgcgatgcctaatgccccgtgagccagacactagactcaacctagcttaagtcgaaaagcctaggccatcgggattacgtatgcacaatctgataaagtgtcagaataatcgcatagtcgccgttttacgaacttgtcgatacttcaaacgaagcactagtcaaaaataagtactatagacgagtgtattacggatgagggggaatttgattttcagcctaccgtcggactaacgtccaacaatgtcggctaatggcaggcatctctacggctttaaccacaagacatgaaaccgatcttccgcgctaatacatcctaattcggagggccaccataatctccgccgaagggccgttggccggatgagattaaatggagaattgtacaagcttgatctgcgcgacctaagggaagagagtgtgaccgtgcaatctccggtctggtgtattgaatactggactatacctgtctaggtggggtaatatatactacataggtcacggactacgtagatgataatatttgctgattcatgtcctctggctagatgaacaaccccgtaatgcctccatgatagtacacttcctctgcaaaccaactcaacttctagtatcttcaaaactgcggtatatattggctagctgtcgggagcggttggtggttggcttgtgttggcgcttgttgattggtcaacggaagtgaatagctttgaagcgagttggtaccaagcgaacccatctggccgttatacaccggccaggaaggttgtagcacatcagaagcagggaagccagcaaatgtaagcttgtttttctctgcggttttctctgcctctatcttcttctcgagctggctctgcgcatattgaaaattgccgctgacctccagtagtataggcagcagattatcaccggctgtgctaccaacctgtgcaacctcgagttgttgtttcagactggatatttggaactcaagtttatgaatcttggccagattctggtcattggtgtcactcagctggcgaatctttgccgtggcttgggttttgtccgcctctagtcgctgtattgattgtaagagctcatcccgctctctatcagcgtccttgaaaccctgcaagcatcgccgatgaatgacactccagtgcttttgtttagaggccttcgctattggcgaggggctctagcttccacattcgggtgagtacttgctttcacgagatcagtaattaccggacgtaccaagggtgtatggagggatgcaccttgggtgtctgacggagggccaccatgaccggtggtaggacggcgtcgagtccgtttaggagcagtatctgactcggaactgccatgaccagcatcagctggggcttcggatgtcgtcctacgggaaggcatatcgagcgtcagcacgccgaaaggggtgtctttgcaagatggagtgagttcagcattgaccgttcgggtggacaacgttggctcttataggtctccggcgtacgcgccagtagccagaacattttggggttagtcccctgccgcttaatctgcgccgcaggattgcgaggttggcggatcggatgcccagtcattggtccatgacatgacaaccggcccgcaataatggttatcctgtaatttccacactatggttacattgagggtcggtggtcagccgttaaccatcacttaaccggtaggtttctcaacgatgaacttgcttcgtcgtctataattccgcagttaggttttgaacattgtcgggacggtgtactctttctatcagtaggtagcgctcattcacatccccaataaacattatcattgaaatcagatcccggtctcattcaaactgcccaagctttgccagaccatgcaatttcgccaagcacccgaccgccgctatccgtgtatgttagtgatctacctggtcttttcggttactctggacggtatactttggcccggagttcccgccgctaagtactcgaaaagctctatcagacagcgcgtatcgcgctgagcaggaactgataggtaagccaaatgttggttaatttccggtttactcactcctcccgatacatcaagcagtccatcaatgatcgccaatctacagtatggtacacgccgtaagatatttgcggcaacagtagtggatcatatgccgatctacgttcgtaaaaggtaggttttgggcgatctgtgaatataagagtctgattcgttggacctcgtaagctactccacattcgaatcagtcgcgactcaatagtgccgccactcaaccagatatcgagaatgtattgtgggttaacatagattcatccctgtcgcataatttccgttttcccgtgattagaaatcatataccggggtacgcgatttggctcagtctcgactgtgtggcacgcgttaagtctgtcacatgcggcactcgttctttctgttgtcgcaaaggccaaggttcccttgatctctaagctggctgtgtttactcgccgtcagccgagggtatgctatcagtttggcttgcatagcggtttctctgtgaaaatgtgaaaacgtgctacgagtcttgggttgacagtgtatactactccaatcttctttgccatttccgtcctagccggtacataggcatatcagggttggagagcacgaaaagtcttgctacggtcacaggcgggaggtatataaggcactgggtgatttcatcgttgcattgcacaatgtagacctcgggttctccccgccgtttcaaacttgggccggttaaccgtatatggtccaaaagagttcaaacggaccgttcaagatccgtaagatgtgagcccattgaaagtccaaggaaactctagttggggactgaatattgatatagagctatatatacaagcccaacctccgttgctcgagtaagcttcctagtgcttccgtcagacccgtctcctcgtgactccgatcaagacacaacttagtgcctgtctttattctgatagaatggattcctcggtaggcttactagacccctttcaagctccatctaactccataataggaatatcttcgactcctcgcgaggctcgacagtcgggcagtccgggcagaacgagcccagtccaaacttgaacaagaattgagcgcctccagggctgccgagaagcaagcgacagaggagctgggccatgtgtccagattagcggatattttctttgaactcagtcaaattctgggcggcgtggtagatcattggctgaaggagcgcggaaccaaagaacccggccaagagccggagtcaacaaagataatgcttgatgtgttgttgaaacagttggaagcacaggagttggccaatagcggtggaaattccgatgatgcctcggaaagcggtgacacaaaggcagcggcatagtgcagctaagtcatggctaaacgagagcttaccgtgcatcgttccttgttcgtgtacattggttattgcttgtgaaatgactgggtttgtttacggcttggtcgcgtgcagaaccgtcgtaagattcttttatctactttgctatggccgttcaaacggattcgtttctacatctgcccatatatgtgccgtcgtattcttagttcagattacaacacctctttccttgaagccgccagggttacatttcagtttgtactaattatggaaaccaacagattttctgtcgtgctcagaagctgacgcgagggcttcaacatgttctggaagacgacccttccaagtataccatcaccgaatcgctaccccggactcaatctgccgccagactgggaaatgcattcgaatgggaccgcattcgacgatcggcagctccatcgccagaattaatttctaagaaattccagaagtagaagatgcaaccagacagctctgagctcgatatgcaagtccaatatggatatctctctcacatcaatgctgaatcatatagcagagggctattgttgagatggtgaaggggctgctcctcaataagccagaatacatgctcgtcgttggtgggaggctgggacccgggacaaaaaggcaagataggggcagcagagtggggcgtgtcatggtttgttttcgttcgtagttggcggccctgctggaaaatagtaaggcattgtcagaccaaatggttataataaaaagttctgttgacgtaccggccgctaccattcatactgcgtggggagtgtgtttatcgaggattgttgtcgatttcttgtagcgtgtgaaagccggtgaccaaaaggtatacgctgactgtttgtgcctattatgtaggacatgctagtcggccagccgtgtgccggtaaaacagactgatggtacccatcttgctgagtttgagtagcttcctctgtttgactggcctgggcgtgtaaccggtccatccatctttgggcgcactttttaggtcgggaggtataacgcctgcattctgcgcatagcaaataccttgcggcctttgagagtcccattgcaggtgaatgaccggtaggaagatcttggaacatcttgaggcatatcgctccatctatccgtgaatccttggacacaagattttgacaagggactccattgtcttcagcccatcggcactttagatgatgagtgggatcgccaataatttggccgaggagtgattgaagattgccagagctccagtgcatattagtggagagtacagaaggatgacaccaaaggaaaggagatatctggtcagagaaaatgaggaatcttggtaaattttaagggatacattcttcatattaataaggtgctccagatggacagtgaaatctctcgtgaaccggacggtcaaagcgtctagatgaaggagaagagtcctaatgacctttggtttatcaccctacaatcgaagcttctatgttgcacatgacgaacgcttttcccttctcctaggaaagcaatacaggttcctaggaacacgagggtccctcaggacattccacggacttgtatgatagagatcaatgttacttaagcgcttttatagccaataggtgtcgcctttatcaacggctgaaggctgctaggttcctgggagcggaagtctggttcctggggtgcaagtatgggcttctaggactgcatgggctcccaggaatacccgtgtcgttccctgggagcacgcgtccggtttccaggaacacatattcaggctctaggagaccgagtgcttctgggagctcaaccgtctgccctgcaaagcaaagggcttctagattatcgccacccatatcactacacaacctcatgtataacagaggggtttactataaagactcaataaattcgtcgtggttcggtttcgaatcgccatcaccaccttgatacagattttaccccacatccacgtgccacactcaagatgtcagacccccaatggctttgggatcccttgagtatctgtgaaacggggcccattagggaaactaagacctgttgtggcattaccaagaaaggagatgcttgcaagctgatagtgaagaaagacaccctcaaggaaggtcgtcacaagttgaacaacctagcacgaggcccattcaatctttctactcttgactcccagctcagcgaccttgtatcattctttctctgcaaacagtggcatcgagagcgtcagcacaatgatgttaagcagcggtggttcgatgcagccgtgcgtaatcaggccgatgtacaagaatctccacgccagcgttttccacatattatcgcggaagaaatcgacggaccgcaacaggaaccagccagcactgccttggagacagatgggtttgctcccacatggggtgttgacgcggctttcccaaggcttccttccccgacatggctagaggtgactcggcctcctggtcgggatgttacaccgggcatgctcacaatgaatcgcgtgccctggaatgtttcacgggataacccagccattctgtccatccacaatgaatacggtggactgcactccctccagattcacaccgttcgccaagagtcctgtccagatggtgagaggtgcccaatttgcttcgagggagatagcgacgatctggtcatgttgcaatgcggtatatgtaagggggtggttcatttggggtgcatggagggctggctcgcccatcgtttaccgggaaacaacacctcttgcccaatacagtacgtaactcatcaccttctaatccccagggctgtttactaatacggacacagtcgatgtaatggatcgttccgcgctctcttacgctcgtcggctgttggaaatgctaccggcaactcgacagcagaaacacctctcgaagacacatacacaccagtagaagagacaagtgtgccaacagcacctccgcagcgtcggtcaacccagactacccggcgttcagaccgtcctcgagtcttctcaagctcatcccttatccgtcgatcacctcggtcgaggcgggttcccgaccgcttcctaccctaggtttatgttccgtatagacgaaagctagtttacgaatgcacgagatcaatgagtttcacaggatcagatttgtcgtagggctatgcgcaacgtgtttagcaccaatcctgagtaaagacaaacagttcatgtttagaaaggttttaggatgcattggaccccttagattttgcggggtagtctatgaacagacatggttggttccagggccggtttcaccgcggtgatcgtttttctgacgcagctttgaacgcttgacctaacaaagctggacagccataaacacaacagccacgctcggctcgataggtcagtgtcaagctagcactgcagcggggcaaacatgaacttacatcatggcctcattatattaatagtgattgtcgcaacgtctctgggtacaaattttcccactactcaatgttgacgccttgagccatactatcatattccttgcatactatcatattacttgcagaatgaatcccataaagcgccagccctctggacctgagcctgtgtggcgtgacggaacgcccgattgggccgctttggaaagaacatctcgtccttctgcgccgtcttccaggccccagcccggtccagtgataattccctctactctgcctcttcctcatcctgcgcagcagaaaagccaaattgaagttgaggctattcagccggtcttcgaaaatccgtggttgacttacgaggcgatcgtggtgatctctcaaggacagtcagtctttctggcccgacacagaaaagacaaagcaacactcgtcgatatccaccttttgaagcagcaattctcatccatcaagccattgctggaaacaatcaaccaaacgtcacaccccagctttctaggtctggtggggtgctattgttgggaggagcaggtatttctggtccgggagccagtagagctctcggtaagtcacatcctcgcatcaagatgcactatcactgaggatgaaattgctgcaattgttcggccggtatgtactactctcaatggttgacgcgggaaagcaaacggtgctcatgcccgataggttctcggaggaattcaatatctgcgcggtcacgggagagcactcgctgccttgagtgccgatactattctactcacggaacttggtggggtcaggatcggtgagtaaatatttgggcataactggcgggccacatgagcatgagattctgatagttgaccatgtcgcagcgggagtggagcatagttgccaaatcaatgcagccgagatggacgctgccactatgaagctgtttgccttagctgaggtggtggagaggctgatcatgaagaatccttcacaatatccatggagagccgagataaaaaatctgcctggagagctgaaaagatgcgattcaccggaaaagctgctacgcgtaagccttgacctcccagccctccgcgtcatgtactgaccaaacagagcaaattgttccagcaattgggggatgagggcgaactgaagatgctggtgaatgcggcaaacaagactgcttaccacaatctagagtcatacaagcgcatatgaacgtggtgacgcgaaaatgcggcgggaatccgtcctcttgccgtttggcaggtgagaagatataattgatggctttgtactgcagatggtacagaatttggaggcaatctgcagccccatttgaggagatagcttgcgggggcttttttgaaatacagctatatattatccatattacacacacacacacaattcattaacgcccggcggctgagccgaaagggcaactatcgctaaactactatacatgtcatagtatatacaattctgtgactcattggagcccatacacaagaccttggcgtatttgtcattctcagcatgcagtgtcgcagcggatgctcgtgggttagtaagttggttagtagactggcttgaaggcgcttctccaagtgttcaacatcctatcttcggcagttgaagcgcgtccaccgtgaatagcacgaggtggttggtgggttagattagaatgaaagaggggtgatttatgttcgtcggcggggttaagtggcctcgaggcggcctgtggctatggcgaatcgtattgaggcccgtactgcctctaagtttggcgtccacttttgatcgtcggaaggcgacttccctcccaggtaaaagggcagatttcctcggtgagtgtcggtacattgtagcatatccgtccggtgtgtggtccacttccgacatcgaaagaggaagtgctccacagtttccttagcttgtccgcacgcacactgatccgtgtcggccgcgttgattcgatagaggtatccattcagtctcgccatgcccgtccggagttgggctagcacggtcgcttccttccatgacaagggatcatacagctgtcgcgtgtgttttcctgggagtgctgcatctactcgtttggcgtgctttccgacgtccgctggcagggtatttctggggactgcttgagaccgtgcgagattcagcgtggttgattttatcctcggggcgcgttcttgcaagagggcatcttcttgtgtcgcggctctagcctgttctttagccagacctagcagcttgttgtcttcactggcagaaacccagcggacttgaacatggtttccgtttctctgcaaccttttaatcaacttgtatatccgacacacgaactcctggccagattgttgtcgagggttcctgagtgtgagaaccgccgctttgttgcttgtgagcagtgcgatcgtgtagtctttcagtcccgtcgccgtgctcaatacatgtgccatggctgccagttccgcagagaatggattctgctctgcccttacagccaaggtgatggatagcgctttgtgtttaagcttccgattccgaggtggtcgcttctcgatggccactccaaaacccaccagctcgtttcgtgcagagctgctaaccgcgacctgcatgcacccgcccgcttcggccagggactcatgctgctcatcaatgtcggtttgtacgcgttccgcccacggggatagcgtgaaggggttgatcgtttctaatgtctccatgtcgatgtgcttgagcgtatcggctacgtgatacagtggtgagcggtggtatcttctgaactttctgatctgatctgtacaccggcgaagaggattggtttccggcaaggtgtggatgtctgtccacattttcacggctcgtttccaaaatcgacgttgtgcagtagccatgtgagcctccgcctctgcgacactagtcgcgactgtgagaaatgtccccacaatggcttgcgcgcctactctttggactcggttgatcggccccatggctttatccttgcacgcgtgcatccagacattggaggcgtagtccactactggtgctactgtcgatgcgaatagctgtcgcgcggttgctggggagaggcctcggagtcgccgaagctccatcgctgcttcgagacccttggacgctgctctcgcgatatgctccttgtacttaagtctcgtgtccatcaagacacccaggatcttaacgtggtctttgggtaccaccgtctgccccttgatggtgaatggctcatggtccaatttacgcatcttgggagcaaagtgtatgatagccgtcttgtcagcctcaaatgtcgctccgcttctcttttcccagttgagtgcctcgttgatgatggcttcaattccttcccggttactctgcgcagtcggaccggtcacccacgcggtaaaatcatccacgaaagcgactgctcctccctggctgtcgatctgtctttgcacgaggtctgcattgaaaaacagaaatagaatcggagacaggggcgagccctgcggcagcccagcttgtggcaagctttgagtctcagataactgcccgttgatcaggatatttgccgttcgttccgagcagaaggccccaacccaacgaagcaagacctccggtatgcctcgggctttcatcctctggatcagtcgttctttgcatactccgttgtaggctcccttgacatcgaagctaatcaagctcagcactcgtcggccgcgccacgccgcatagatctgctcctgcaggaacaccagtgcttgctctgcggaccgctgctttcgagccccaaagtggctcccccggcggnnnnnnnnnnnnnnnnnnnnnnnnnnncgcgcccaaagggggctcgtcgggagcagtccatgcgtctccaccgcgtgcgagatcctctctgcgatcaccgattcgagtatctttccgagtgtcgcaaggagtgagataggtctccatgcctttgcaatggtgtagtcatctttattcggcttcttgagcggtatgatcttggcctgtctccactgtcttggcagtgtgccctcttgcagcgaggcttgaaagaggtcgaggaccctgtgcttgactgagggccacgtcatcttccaaacgatcgccggtaggccgtcttcaccaggtgccttccacgacttggccgctgacagttgccgctctatctcctccatagtgacggctggcatgtccacaggcgctctttgtggtctcactccttcctcgtcgatgttctctggcaaaggcgggaaaaacttggatatcaattcctccgcttgctccttgtgatcgttcgtagtggttccatcggctctgaggagctgcggaatcttcccgaacgcggcattgtctcccgacttgaggtacttggcggctttccagatgttgtcgttgtctgcgagaaactcgttccagtgcttcttcttttgtttgcgaatggcatcgtggtattgtttggccgcatcctgggccatcgtttcgagccgggggacttttcgccccgcccgtcgctcggagcgagcacggtttctccagtgcgtatatatatgacggagttgagtgaggtcagctgtccaccatcgcttcgcatgtggtgatggtttcgccctcggggttaaagcgtgtaccgcttcggacactgccaacatgagtcgatccgttttctgctgtaccgtgccctccgacggaaggatggctagagcgttctgaatcctggcgttaatctccttccatggtgcattcttcagtaaaagtcgctcttggtgctttgggcccgaccactgggcgtcgaacacggactcaatggcgcagtgatcagagccgtggtctgtctcgagtaaagcacattttgtcatggagtccgtcagattttctgaagctaggacgagatcgatggtagactcgcagtctccactttgtccgccgccgtgccatgtcttggtgccgcgtttaagcaagctactgagcgcaaactcattcataaggtcaatgatcggatccgcttccccttgtcttcccagcgacacctcgtctccaccccagagttgatcgtgtcggttgaagtcccctaccatcagaatctccaccacggcgcctgtctctcgtcgtacttttgtgatcgcatcgtgtaaatgattgcacgcatcgtccaaggctgagatattgcctccttcaacgtaaaccgatgccataaagatcagtcgctcggggagcctgaccatcgctgctgtgatgtctggagactccacagggacttgctccgcttcgacttctttgttgacccagagcatgctccgaatcgcccatctcccctccctccaggtagagggcaccatctttgtccacttgtgatgccccattggagtggtcaagagccggccttgaatcctcctcgcttggggttcctggatcgctagcgccaccgcgttttgagtgtcttcgtcattcattaaactctcgtgcactgcaccctgcttcctcacgttcagctgaattattcgaagagaattattcatgacgtgatggatagagcttccggcagttcttgctgtacgattcgtgaggccctccgcacggtacacactttggaaccggttggatacagtcgctgtggcgatggccctctgtagcgcatttcgcgcatttctgggcgttcttgcactggaatgccttatggcctatctcttggcagttgtaacattgtgtcggtcgcggtcggtgttcgaagacactagtcacaccagattctccccccgcgtggaaaaatccgtcggccaagagccttcgcgcgtcgatgcgtttggtcaggtaaaccaccattgaaccgtaggccttctcgctctcttttctgctcagccatgaaatcttggctacgttggtctcattctcctcactaaacgctgctgcagcctcggttcggacctcaccgctctcgtctagcacggaggtcttgttgacgctatcgactttgatcgggtagagctcgtcacggaggacccgagctcccgccccgattttctgttctgcaacctttttgaccagctgctgttcatcctcatcccggcaggcgatcctgatccggttggcgtttttcgggtcaacggtaacagcgcgacagcgccagtgcgcgtggccctctgttaactgtatctctgcctcaaccgctgctctgaccgagcctgcggaggtcgattttgtccctttttctgccatcttcgaggtatctatcgtgcaaaatagcgtgtccgtaaaggtggtgggtgtcgtgttcagcgttaaaagggaccgtatgttgcttgggtaactggacggcggagtgcgcgcgacatctgcgtaggaaggagagcctgcaacagcgggaacactgatttcctcgcgtaaggactggatttcgcgcaggatcgcatcgtggttgttctgagagcacgtctcagagtggcattgcggtgtcgtgtttctattcgtcagggactgtagctcgtgtcggacctccgcgagggcggtaccgaactgttctctggttctctgaatttcttccttgtgtatttcgtcacggagtctgatctctcgcctgagtttggcgatctctctcaccaaaccgccgacgtcgagctcttcgcgctcggtcgcggcgtcgtccgaagttacctcgtcacgccggtctcctagctcaattctctccttttgctgggaacgcgtctttcgtcgatcagtgtcaatttcctgctcacgagcgtagttgttcggtggtcgagtggtgcgtttcggtctcgccagtcgcggtggcgaatcttcgcgttcgtcacagtcgggcggttcaggggttcgcatcgcggcccgtcccgccattggtcacagtaactcactagacgcgctcgaaatcctgatgaaagtaccgagagacaagctacagtacttcccgaaactctttatactgtacgagctatacagtacgtctcgaaaccggtgcaaccacctacactcttcgattgtttctctaatcttgattaccaattcacgctagtacgcattagtagtttttccggagcaccactgcccatgggtattgtactgtttcttacgtagagtacctgccacaaaggtggggtgtattcgcttgtaatattaatatacacctcacacctccgtgccccaccatgaaatacgtaagaaacaacagatgccagttacagtgagacctccaaagtaattgcaccccttgacccacgcctcctgattacataatatactgccgtacaaaaactccataaattcaatggtacctagtacgatgtataccagccctcactttcaataatagcctgtacacgacggggcatagtatcagatagatgtttcaaatggtccagatctagcctcccccatgctatttgggccgtttccgcaaatattgcctttgtttcatcgttgtttctcatatctaatagatcaggtcgaatcttatagatttcggcctttagcaacgccggaggttctcaattggatttaaatcaggagagtaaggaggccattacataacctcaatacccatctcgcgtaaagcgtcccgaacaacgtacgcagtatacgttggggcattatcatgttgaaaaatgctaccctcattggcaagaagaatagggagattttcggtatataaatcccgaataacgaaacgatttacgcctccacgttcaggttctgggcctccgaatagtagaatcaagccggatcgtcgttgggcgccggagaatgcagcccaaaacatttgctggacttgtttcccttgatatggaagaccttgaacttggtgaagccggcattggtcctttcgtcgaataaaagtccattctcgacgaacgccaatcccacgttcgactgtacattcgtcggaccaaaagactctggcccagtattccggtgtaaagtgttcataacgacgggcccatcgaagacgctttataactttttcttcatcaagatcggatcgccacatacatctccacttccgatggtgttcggtatttaagagtcgtcggattgacccttttttgactgtgtaagagatctcagcaagtagatcttcataggtaatctttggattctcaataataacgtcaaaggacggactttttcagttgaatccaggatagttggccgaacagagcgtggtttcgaaacaccggccgttctctctggttccttttttagtatatcgtatagtagacaatgggatttgcggataacgggtatgaatacgtttatacccctacccaatagtatgaagctcgcacatcctctcacggatagctggggtgagctcggaggagcgagctattaaaaaaaaggctttgtagataaatatctaacagtaatgagaataagaatagggattattgagagatctggggaagtaaaaacataactgtacgcgcgacgcgacctaggattagcgtatttactatggcggtgaagctaaaaatgataggcggtaagaagatggatctaggggggtgcaaatactgtattgccttccccaaccaaaaacgagccaaacccaccgttatgtcatccaatatccgacatgtgatgataatgcggggtcaactttcgtaggccagaatccgtcagctattcttcatcaccgatcacaaacgaagaacttggtttcgatattggtcgagaaagaatcgtactccaagattccaatgcagaacataggcttcgacaaagcttgtgccatggagcttttgcagcgtaccaacccctttcttgaggaaagaggtctttctaaacactcatgggccgaatcccccaatgctgcttactctggtcccctccttcgggtgtgggacaagttctctggcagtcacccagatcaatcaggaagaatgcaggctcgtttgcctcgggagcggttgggctcacaagaaagccgaaaagaatacctagccacacacgccaactatcaaatatgggagccgacaccattcatatcattttctgcgtcggcaccgggtttattaaggtttctgtccaggcgaaaggggccaagcttccctagaacacttacggctataaatccaaacgttcgtatcgcctatggtctaccaatggtcgaaatggaatcagaattgaaatattatgaagtgcaagacccatatgggagggcttattcttattacaaaggtgaatatctttgtctttgggaggttacgcccgatgaggttgtggcacactgggactgggacgtccttattgaaaacgatcattggtacgaggacgagatactaccggctttcaaggagcataacgatctcttcttgcgcagaagtcggattaaagcgacgtttgatatgtcaacacttgaaagtgctttgcccagaatgctccctggctcagtcgacagagacgcactatctgggtcggatctggaccattcgagccaattggacccattatccaatgaggattggaattcttctagcgaggaggagaattggcagttcgaagacgatgcttattgggacacggacgatgaagcagaggaagctaacgcaattgatgatgcatataagattctggaaggcgactggtgaaagaatatccttgcagaacaagaaatggcagatattaggttgctaggtgttatgccttaccttctagcctggccctcaatgaaacagcaggtctattaacatgattgtattagcttccgccatgtcagaacagagcgtcaagtagagagagctatggctgacaggctgagtataatgatgagcaggttcatgagtagtctgcaggtacagtacgcaagtaatgtaagccactacttgcaaggtctggcgccgagtaatacccccaacccgtcacttggacataggagtggcagagggaagtgtcaggttgctaggtcctcgaggcaatccctagatctagtttttgacatgtttgcatttccatagaaaattctagttcccttgggccgccaatgcaatgatgagacaaggcaccgtatttaatgtaagtcaaataatagtatcgagactgatacaggaatattaatgttccggggctattcctaatgtgttctagtgtctcttgggagtggggccagaaagagtgtctgagattattcttgttgcaccggtttcaggacgtactgtacaataacgaagtgattgttactaaacactgagacaaagtggttgaaaatagtcagacatgggcaaatcttaccccctttgctcgtagctgaacttggctttgtccgtaggaagagctgccctcgcatatcgattttccattttcagcaaatacaccatccaccgaaaatatctcaggagaaacagctttcatgtgatctaggagcagatatttgatggattcaccgcgcctgacgcatgactggatccatggcgacattccgtatcggtccatggtattgggattggcgcctcttgagagtagcaggctcaccaagtctctgttacctctaaagacggcaagccagagcactgtttggccctcgcgatttggaagatcgatcttgacacgagggtgttgaaggagctggttcacaaccgcagatgactctttcgccacactataccacagagcactctcgccatctgcgtttctcctattcacgtgcaaatttttcttacgcaccaagagattggtaattagctccgagccatatttcgcggccgtcatgagaggagagaaaccatcgtgcagcgcattcacgtcggcctggtaagaaagcaaggtctttgcaaaggcgcgattggtgtttctagcggcccagtgaagcgcatgatctatagaatctctgttgggaagtcgagaatggaactctgcacgacattgtcaggattcggaaggctcctcttcatttcataccatgattttgggcgacggagttcagtggaaagggaaacaacgtgctgctcagatgatttttatcggttccaaggtgacggcaatagataggaatgaaagtgatgtaactaagttgttaagcatttttgaattaagagcctggcaagcgcgacatacgtggaaggggagaagcttaaataacactcgtggtcaccggccaagcatcagtttccccctacctgctgacgcaatcgactagcggtcctaggaacgctgtctaggtttctaggattgctgctcggttctacagagaccaaatccataggagacatgtaccttgcgatgctaggattgatattctatgatatttgtgtgggacgcagcttccaaataagccattgggtatccgaaattatttgtccgtccccgcttcgctgatagcctgcgtcaatggagcggacttgtctggggtaggggctcttatagtgcacatgtaggtggcgccagtaacaggaactaaacgcgatcaagcgtaatgattcagcatcggtcttcatctataggaacattacaagtatacatggtcacgcgtaattcctactggtggtttagtctgtcacgtgctctttctagccactttaggttaagcgcggtatgtgcccagcgaaatgccggtggtgattgcttcgagctgagtacaagagtacgcaactacgcccttggctgatggagctggatcctgctggtagtgcaatagtatttgtatggaggattaaatagtgttccgcgtacaaattcggttggcgtacaacaggtgcaactgctttgtgaagggtgagcacaggatatatataatgactggtatgatttgaggtttcaaccacgaacctagtgaacatggccttctatagcccaggatagcccttcgcgcttgctatctccagataatgtattataaggtcaatacctgtgtttctacacgtaacaacgcgtttttgcacgagcatagccgcgttgcgataggcgcaaagtgatatttcctaaaacgggggttcaatttcagacccacacaggagcccctattggctggagcgctagcgctcgcaaggtagcaccaccacgtgatcgctatgtcagtcaaaacacctcgtcgcgtatcggagccggtattcctagcgccatgctatctgtgctatcacaatattcacgttgcctgcctccatgcagcatgcccccctcatgcgcttcgtactcctgcaacacctgcatagctttggtgatccctccactgatacgaaccaactcgtcttctagttgagtttctcgagatgaaatactatccaactcgtcctggagttgacgaatttttgcgtgtaatgtgcgattctcgccgagggactcctggagatggatgctggtgcggccaagctcgttctttatttcatgattggcgcattccaactcgcggatctttgctgtgaaagagccgtttccctcctcgtcactacgggctggcccagactatattcaaatttagcaccgcgttggcttcagacaactgccaagatctcaatgctcacctcttcctttggcagatggtcccgttccaatcgggcaacctgtagcgtctgcggagtaactgcctcaagcgaccggcccaattcctcgcaaatggacctatacaggcccacgcttccactgctcaagttcgtctgcaacaggcttttcttagattccgtcacggaccaagcgtatttgtctccgactgatggctgtaggcggacatcgctgggagcgacgacaagaccaagtcgatcatctgacgattagttttgctcatgaggcagaggaagactatagcatacatatatgggctgccaatgcctcacgacactgttgtctgaagaaagcgcgcctttcattgcttgtgaggaccatgattgtatttgatctgttctgtcaaacaaggcttaaacccttgatatatgctcaggttaggcagtagagatcatatacctcgacgacttatcggctgaagacgatctgattgtcgctcaagcatcaaaaccccagtggggccaaccggttaccgatgaccacagttgaccgacccttggaaattgtcaactggctatgaatttctacgacaattgtattagcaataatcgtcagttttgtgatcataatctggagatttgatgttttcgaccatgagtcctaatccaacttctgccgcttgttggaccgggcagcctttccacccaaaccacgctgatgctgctcccgatgatcgatacgcagccacttttgtcttcggaatatgactgaaagtcgaggcggtctagtccaaaaatgttccaagaagtcgttcttcctatctcacgttagcgtgatcgagagcatataagaggggaatcgaacagaccatggatatccgaatctttgggaattggcctgggcttttatagacggattggacccaacgagcacccaccctttagtttaaacgggctatttatcaaccgttcaagtccgattttcgtcaaacctatccaactaagcgtttattatgtctcttggtcgttgtgtttttgcaccgtcagattgtttctccaaccatcaggtatccgcacctgggttcagagtaacttctaggcccttgactgtcagttagatagcgtagagggtaaaaagctacaggatggatcgaaatcagtttcaccacttgcacacggagattctttctcgaaccctctttcaaaacacgctatgcctattatagttactctatccctgaccccgtttcttggcagtattccaatacaattgtaaaaaatacacttggattcgaaattggcttccatattcaacaggcacagtatctcaaaccctgccactgggaccatggtgaaactacctggtcatttagctagcttacagaacttccttcgtgtcacttcaatactgtaaagtacctcacaaggcttatgcactacgtttcctgcatcatttgattaagtattctttctgccaattttgccttggccgcctaggcgccttcctagtaacccctaaaaggccaagacagatgcctataggagcaaaaatattctgccatttatttccgtcttctcggacacataaaccaccacctgttccccataggttctattctaccatcctcgcatcaatttcgacttgccatagtgcacggtacaataatacgacatggtgggaagacaagtatcaatgataaaacaagattacggtgaaatcggccaatcattaattgatgaaataacggatacattgcgtactcgcaacgcagcgtcgttactctacattgccgaacaaaaatgctttcagatcactggcttctctgaaacacagcgaggaaaatgcgttgaaatactctctggagtgcaatctagtgcttaccacttaagaatcaacgaagaaaccgaccaagacatcatacgttttcaactcatccctattttaagggagagtggccttgaccggacagcgtacgattttgctcgatccgggcaaaattttatccaagggcagcgcgactcccgaagccggaatgccatccgaacacgattggagagactgcgaaaagagcgacagctatcacctcgaaacctttgatcaccttcgtctcgtcatatctacaacaacaagggcgcaacctaccttacagcaatgtggctagcgctcacaaaaccataacggtagatatctcgcacggcgccggatgctccgaaaatataccccaactctcgcgcttgcaccgacgttatttgtggaaatccgccggacttttttacgctctccgtatgtgatcaaaagaaggcattttaattctacatatggcactgaatttctcgccgcggattcctccatgcaattagccattccgatcgaaagttttgggtttctcgtcttttgcgtacctcgccctcgctgttctatctcggctcattgaatgtatcagtgattgttaaataaggatcccttgtctcctctgtgtcatgccaattgaatgtattatattcaaatgaaatctaattcctggtgattgactagttctggcgtcttgccaatcgaaatgattggtaatatagatgatataagctaaattagatcacatgatcttagtaagcacatagaataaccgcgcgctcagagatagaataatggactgacagatgcatatactcgactggatatctattggtccaacttcaccgccctgattacgtgttccgacatgaacaccatagcacgtgataacgcctttcaatacgattcaatacttgagacggagctaagtcggaaatggattagtgtgtttcgcactagggttcgagatagattttatgagtgcaaagtggtgaaactaatttcgatccatcctgtaaaattggtttcgcactaaatcacaagatccaatttttcacatgactatgacactatgggacggcgagtgaactcggaagagcgtacaatacaatcaaagtccttgcgccgccatagtatgggccgtgctgccgactacaatcatcaacttcttgcgactattatgtgaggagcgacaggttatggatatgcgttgaatgtggcgagtgaatgtgacaaggaacactttatggtgaacgtaaggtcatggcggcgataaatagcatcgggagccccagccaaaagcatcacctctcgcattgcccaaaataatgcctctcatctctcgtcagccaacgcaccccgcgggagacgaacttgacactatgcccttacttgttcgccgccctaacacgcggccatcgcgaaagtctaagggtgccaacagcccagctcaatcaacattgcagcgagaccagcctacgcttagactgcggcttcagcagagatgcatgacgccggaggcgtggtggacgtctcttaccgcgtttggtgcacatgataatatttctaagcacatgctggaacacgagaaagccattgccacggaggaaattcgacaggaatggatgcgacgtctgcggcccatgccgcaccgacagaacccaccggcaaagaaaggaaagggacacaaaaggagctagcgctgctctatcatacagtacctggcggagaaacaatgttccaagggaacgagccttcaattactagagaactatattgtttattgtagatgtgaatggtaccatttcacgatatacaatatttgcttcaatatacagccatcaccttgaataaattagaaagattcaaattgctctgtggggatgacataaccagtcaaaagtaagcctacagatctagctcaaccaatggacgtctctgtatgctatcccaaacgagcgatatcgagatgtagcagtgtgaagaagcaatagagatcaaatgctgcatatttctcataatgaaggaataagaaaaatgccgtcgctataggtatatggaggagttactggtgggaagacgccgacgctgatgcccactaacaccatatgaaggcgatatccctgacggcaccaaataacgtcactgcacacgaagcggtttaatatcagcggttaggtattcaaatgtaggtctataccagcaaatttgtatggtagctatagggagtgaatgttggaagtcggtcgaatgcaagtaactaagggtctgttacccagtactactgccacggtgaccttggtctagccatgctccaccatgggcagccgagtgagaagacctatagtataaagagagactttcccaacagcggaatgaacgtatttgccaacacgatcagtcatggagagccccagcaaaacatcagaagtcacaggtacacaggaagaggcaccactctacacacagccgcgttcaaccgaggagcccccaattcccggtgttgcaaccccgctgccggtaagaatagaatatgaatagaccggaccacgctgaccagccagacccagaatcacaacatagagaggcagattttggctgtagagcccttccgacccatacttgaggtcttgaagcaaattgaagaagaagatactgaacttgcacttcgtgctgcacatctggtggggtacattcgatgtctgtgggagtcttgtgtttccaaacatacagacatccagcagctcgaagaggaaaatgagaagctgcggactgggaatattcagctatgcaacgagggaaaccgcttgaagcgctgccaagatgagcatgtagcccgcttgcatactatcgatgatgcgttggatcaagttcggggaagactcatcggtgtgctcaaagtttggaacgagcggtctgtcggcgacttggccattttgccggaagatgggtttccgcgatgttagtcgttgctgtcgaacaggtcaaatttacttcaaagctttgcaccgccgcaaggcttcaagcaagtgttcgatgatatcaagcatttgctagtcctccttataaatcccttgaatctgtgtgcctaaacttcgcggactaccaccgttgctgaacaagttgattgttcatcgactgaacttccagcatttcgaacagcgtaatgtgacacgataatctaggtagtcagaatgcataattggagctgtcaaagtcagccaagagtggtatttctttgtacgcgaccaaatttacctctggaaataaaaaccagcagtacaggacaactccaaagaccgcaatcagaagaagcacacctgccaaccccattgcccaatgcaaagcacaacgtagttgtaacccagtccgggaaccggccgttgtatactcatccagtgaccacaagagataggccaagctcagataatccacaaagtgaagaaagagtacggcatgttgcagtgggaggtagacgtaaataccaactagtgtggctgtaaccttgataaagcacgaggaaagggaaaataatgaaaaaaagatcattaattgagatggtgtattggtaaggcctcgcagcagggtgctcattcggagagactgatttttggtggttaaattaggatcgagcaataatatttcagacgcacgtaccacgagtaagaacggaaagacgctggatatcccaagtattacctctcgtacgacttcatttgtttcagtccagctcagtcccacatacactaccataaaacatcttccggtacagatactgcaagatcaagggccggatgtggccaagttccccggcctgctcgccgagacaattccaaacgggcaaggctgacaattagcagcacggtagcaagggcagcatggaccttaggcaaaatatgcatgactggccgccgttctcgcaacgtgcaagtgtactgggactgggttgaacttatacgcaggattacgtgctactggattacttgtgatatcatgaactggggctcaataatcatgccttacgatctataatggtcgcatataagttgataccaccgagcctccttctaggagccgaatgaatgtccctaggaacgggacgggtgttcctaggagcccagaaccccccgggaacacatacttggatcccgggaaccagctttctactcccaggcaccgagcaactttagcgcccataaatatagacacctattgattaaaaatgtgcccaacaagctaagtactctgggagcgagagtgactctcctaggagcgaactgcagtgcttaccacacgcattaaaactttctgaaagctcttataagataccttggtccccactgtgttaatagacagacacacttcctacaccgttcaatccttcaaattaacttattatctcatcttcggtaagagcttcatagcttgagccaaacgacaatatactgaacttctttccaaaatcaacagctcactgcgttcgcataatctgtcgagatgtctcagtgccagaaaggaatttcgttattatttcgtcacgaaggctactacgagatagcatgcagcataatggaacagctgacggcttcggatgttggcgctctcttagcttcacttcggattacgccagcccagcatacagtagagacgttcctacagccactacgagactttgaccccacgatgcgacagtttgagtcttggttccaggacaaatgccagatactgatcatcggcccggacaccattcgattgagcgaccgaatcttcaatgcagacgagtactacaaagggaagcgcccaagtcaaacccagctggaggtgtggatttttgcgatacccgccaattttgagaagagtgctaaggaagtccaatgcctcaggcactgttctcatgcctcctctttattctctatgcaggagcgcgcagaagcactgattgctggacaagagcttctcgaaaataatctgatcaggcagatcagttatacagatgccgaaccaagcaaagtacctggagagtacctagatgtcaaaattttcgatctttttagcacgaccacacatcggtatttacacacaacacatctaattgggcttgaatttgcgggaatggaatttggcatcgagtggaacatcaaggatccaacgtcgaaggaccactgttggaaggcaagtcacggaattccttacattgaggctgctagccctcgcgacaccaaggtagccgtgaaagaccgtcggcgtcatcaaaaaccccaaagcctggtattttaccccgtgtacccggattgggatccacagtcaacggtttctatccctatcagctcgtcctgaactcttgcgttttgtcgcaacaggtgtgttgttggttggtcagttgttaatggtaatgaacgagtactgtaatagaactataatcttacgttgatatagcggaagtacttagggctcgatgacaccgacccaatagcagtagatacggagccagagacaagtagattccaaggccgcggtcttaaggccttgcaggccatcagattgccagctggcgtcccctacaattccacggcccgcttagccacaggcctcagagctacagatccctgatggctcaagccctgatacaagcctttaacgtgaagtccggttgcgcgagcgaccccaccaaaaacccacttcaataataatgcatcgtctttaaccacaacaacaatgctgccccccccccctcccccccccaacgctccgataagaaaagaaatttgatagagcaggagggtcgccttttattagctacacaagctataaaaaatggcaaatatccctcagctgcagctgctgcacgatcttttgagatacctgtctcaacttttgaaggtccagaccaatgggcgcgaatctgctactgaaaagcgacacaaccgctttattcttaccggaattgaggaggggtcgattgaaaaatggctactggatatggattccagaggggtagctcttaacttgcctatgttgcgagatatggccaatcttctactttacgcccgaaaaactacacccactactgtgggtaatcattggcctgctgaattcatcagacgacgcccaaatctctctactcgcctctctcttaaatacgattatcagagagctctttcagaagacccttgaattattaaaccatggtttgatttggttcaaaggacgattgaaaaatggggcatcgcttcagggtagcgatagcgatccaaatactctttggaccctctcaaagtttacaaaatcgcaatctcggatcaaaaaggtctagaatcttctgcttcaattctttcttcaccaacaaaaagggagattaatatgagaggactataaaagtggtctaccaccacatgtttctctagaatcgctgtaccctattggaggctaccaacgagcaacagaccaaaaagcgagagaccaaacacaagtttactactcagaaaggcatatttgggggtctagagggtggcgaggatgatgtggttgttgaggatgaagatagaagcaaagatatatcttcaccagaggtgcctgcaaaaccggttactgagcctgctttaccttctatgcccttagttcggcggcaggtgacatgtcctggctgtggcataaaaggtcatacatattctaaataccctacacgtgttcaatagccaaatttatgtttttttctgtggttttaatagtggttaaaaattgaaggcttttcaaggtttggtggggtcgctcgcgcaaccgggtcgcccgcgcaaccggacttcacgttagaaccaattacagtgctgtgagggtctcatgtatacatagaggtagataccgtctggagataagcaatcaaaattaagaacaactatgattgactccagattcaagacgtacgaccaagaagcaaaagaaaggtacggtaacttcctcgcgttcagggggaaccgagatacactacgtgggtcgaccatagcgttcatcctccaataatcgtatatgcgtcatttctgtccctgacaagggccctagaagcaagtgtcgcgatcccgggagccagtgccttgacattcaaagtaggtgatgtcatgtcgaatgataccggggtctatagaaacgtcagcaaagctacatcgtcggaatctagttaaatagatgccatggccgcaaagactctcaagcccaccattcaattaccggaagttatacaacgtcttcgccatcagagaagatcaaatgcctccacagagaaggccagtggcgttgcagaggcccttcccattaccgaacgttcaccgaggtcagtcgctggggtggaagtaccataacagtcctgactaacatcggcttagacagacaacatccaactcaaagagttgagggcatcattacgagcatatatgctgaaatgtcgagaatgcagcatgaacaaatcctcatggtgcaatttcgcgacaacatgctgcgggcttacagaaatgaaaatgccagtttggaggagcaaaatcggtctttgcttgaacatgtcaagagtcttcagcgagaaaattgctccctagagctcaagcacaacaaactgatgtctgaatgggcaaaggagaggctgcagtacccagagcagcccgatggaaagcgaccttagagaactgcttgaccagatctgattaaccggattttgcatcaaactctgaggtactcggaatattttcacccgcgagtctgtgaatatgaaggaagaagaggtacctagaagggttagcgacgccatcactaggtgttcaacagggattgcgtcgaagaccgagcgtgtaacagtccgtttgagcccgcaagaaatgtgccgaagaaaccgcagccaccttattactcatggccacaaagccaagttcctcaccggggtagcaatagctgtaatacaataaccatgctttactataagaataagtggtctttccctctagcttggcaaaacgaacagaatgcccccaaccgggtcaaagtggtatcgatggattgatgatacatctctccccaacttatatgccacttcagcggctataatcatagcaatttgcttgctctattggcttgcacgagatgtgtggctctgggtgtggacaagacgccatgtgatctcccgtcgccccttccgatcgaaaacgataggctcttggaggcgacttgccttcgtccacctgccgaaatgcctgcgttggcttgacatccccaactaccgggaagcgctcatcctaactgtcatgctcgcggcaaatattattggcctccggcttagagcccattcttgggcggaagcacagggtagggctggctctttggcagtcatcaacatcgtgcctttgtgcgccggtatcagctttggacttccagcggaccttctccacgtgggccgccagatactcgcgtggtttcatcgctgggtaggtcgcatctgtgtgctccattctctgattcactgttcgctgcttgttactgtcgccaggacgacgaacctggcgacctcacggcacattgttccaatagccgtaagtcaaagatatgtgttcctattgcgtatactaacatctcatcaaatataggccggttgtgctctctttctcgtgataccggttacttgtgcggcggtccaatggcgatacttgcagattgcgatgaaatgtcactaccttcttgcagcaacggcgattggcgcgcttatataccatctcgtggagcggcagtcactgtatcggtggtacctggtaggcgccatctacctgtggtttttcatcagcgctgttgtctgcataatggccgcatggaatcacaaaccttggggatcttcccaaaaggaggtagtcatgaactcggtgagccattttctctggctggatatagagctacccctcaaccgagcgatccgccctggccagcacgtgcagctttggatgccacgagccggttttcgggctttctttcagctccctcggttctatgttgcattctgggaaaatggaccaacgcaaagaatagtccgtatggtagcagagccgcaacccgggcttacgcaaaagctgtatcaccaagcactgaaatccccggccaagcagtcggttatggtactcggtccctacggacaccctctcgatttctaccggttcggtacaatcctcttcgtcgtggaggatattggattttttcgagcgctttcatacattgagatgttggtggaggcaagctgcaggcgcgaagtgatggtgcgaaagctcgaggttctctggaagcgccaagttggcaaagatggtatgtttcatggacaagtactttcgggtcaaggagccgcctgttgatcgggcttttccagagaatccacaatgggtaaatgactggatacaaggccttttcaatcgcgactggagagcgttcaaggtggattttctgctgatgcaactcatctgaaaagtcacgatctgaccattctccagattttgcaattcagcatctactgcccgcgtactcagactggaccccagaacaatatttcctacgaatatgccgaaaggatttgctacttttatggctcgatcaaaatcgaggaagaagttgaacggtatctcaacaaccaccaatgcggagctgtggccgtagcgggtgagtttccgagttctaaccttcaccccctatcgtgggctgaataacaaagttttgtgcttacggtgcttaccgcctatgcagtatgtgcgggtccgtcaatacgtgaggctgtgacaaagactatacggctacacacaggaagaaatctccagctaatggttttcgaccccgatatgtgtcctgcgccggatggacttgtagattcactcagcagcgatgagactccagctggcagccaggatccaccacatcaacttttgggagtaggcgaggataggcatactcaccaagtacgacgattcctagcggacagcagcaagctacagtacccatcgcctaaagaaatctatacggaagctggaaacgtcgaaatgaacaaccactcgaagtgggtggaaagtagattggcacaagggcgcagaaagcctacaaccactaaaccttgagattgtgccagctttataatgcttgcgctctcagcgtattgatagattctgcagcttactggaaaccatatcatctgccgcaagttcgtatatcacagggagggcatgggaagcttggagcctggccttgattgccgcacagccggtccgccttcgcgagcagatcccttcctggggaaacattgatggatatcttaagtggttgatatgatagttgatatgataggaagacgatcgccgaccatggcaaagctggcagcgaagcgtgccagtctcgggtaggatggtgtgtgcatttcgtcccgcagatccagcacactccggagaaggcactgaactgccttctcttcgagaagatttcaagggacgaaaagatctcttggctctattgcttagaatattagtatttgcaacgcatagatcatgagctcctcatactttgcatctatccacaatttagtgccaataaaccaattcatctttgtgtgcgcagagagcttagttgaagactttaagacttacaaaagcaagtgagccctaaatgtcactggttataaagtatacaagagaatatagagcgaggtagaccttggttcatggaagcctttccagcctaagtcaagcggtattgttgatcgcacgcgaatcatattatttggaacccagaaaacacacgcataggtttaggcgggaaggtatgtcttgacaaggaatcgaataagaaaagaacgatattgtgaaatgaaaccgttcaactctgcttcgcttgttattggccggttggaacccggttgaagtgtaacgttttgagggccatgaacacgaacacgtaggagacatcaatatgggttgcattgttcaacctaactcaccattagccctccgcttctttagcataagggaaaggggttggtaccattatttgcgggagttgacgtcccctgtctaactcgaccggtcattgttttgaccgacggtgaatggaaccaccgcattaaaacacgcccccacttacctgtcaccagttgtggaacaaactaggattgcccacagaataaatgaaaaaaatatatgaggaataaataagaccgccattgcattttgaggttgttgcctactgaacgaaaccacaaaaccataggaacatcgaacatcaaagtagacttccgcactagccaatattacacaccgagatctaaattaggttccacaccatcgacagcatacatattcattcctgggtcaatccaaagtgctccaaaaaggtgcttccaccgtcgctgcacgtgtgccattagtgatctcgcccttttgtgccggttggccggttataaagttgcaagttgtgcagctcaaacgtctcacctttacaactcaaggcttcgttacaaccattttgtcgtagcatgttattccaatttctgtgtctgttgaaatccgtgatcaaatcgatgaaattacagctcaacgtgccgattgtatattccctagtgtaccattcatcccaaagttaaaacggaaccaccaagtagtgccagacgcttggtgccttgcaatggagattttggacaggatacaaggcctcttctaacaattgagcggtattcaagaggtagccaagtcggtcttggagctcctcgattggagctactgttcgaaaataacaacaatgaacggttgatgttctgattacaagatcataaagatcatagtccttatgtatgggaaaagtgaacctaccaaggatctttccattcacgcacgagccaaatatcgctggctttaattctaatattgggaccccaaagcattggaaaaggctgctctatagatcggatgagtaagcaaaggcgcataaagtgttgccacggggagcgcacgcccgtacggatgtgtacccagccagcccatggccaaatattgatagccggagaaggccagcctaggctgacagggtgaaacagaacactagtggcgaagtaaatatttctatccaacgaacaaaagaaaaatgaaggggaaaaggttcgaatatcctccaggatagtacattatggttgaaagcgaatgacacgcgaagcttggatcggcgtgaaggaccctggtgcaagtattcaaacagtacgccgatgacaggcaatccatgagagcaaaacattcagagttcccaatttcccaccatattctgtacaaaggtctgtgggtcaaggaatggcatgggtatagaagggtgaatgcgagataaaggaaccgaactccacggggtagaattatctgtgatctctacccgtggccgtatagctaactgaaaccgtgattgtccagcgcttgttatgtttcccactgtagagttctgcgagaggatgtcacttatctgacaacgtatccttcgtaagtttcccagcattgactcaactcgtggaagaaagaacggatactcttcgacagcctctccggtttccgtactgagcttactgagccggagttctatccagtccacccgctcaaaaaggaaaaatgccgatacataaaggaaaatatcatcggcgcaggtgtcttgggataatggatctggccccgtccagctgaaggagcggacgttctcgtagctgggatagaagacacattcaatggcaggagtccccttatgtccatgctgagtatactctaaccattccttgaggggttgatttgagcaccgagtgctacggttttctgcgaggcaaggcggcggtgtcggtatgttgggaaattctctccaaattgattcaagatccagatccaaatcgtagtctgaagggacatcagcgccagtgttaagtatggaagaaatccaactaaccaattcgatcaagtggtcccattattcccatgcaggaagtacagcgttcacgataaaagacagtctcaggaggtaaggataggaaaatcttggtggattcatggggtctatatgtagaggtcagtatgactagctgctagggtatagaaagctcaacggaaaaaaaaaggtccaggaagggtcttggccatgaccgtgagaaggctatgttacccagtgatggtggctcctggtctacgtaggagcaaacggtgaatgatcttgtttcctgctgcaaatgtactttggtgaagggtgcggaatgcccgccccacacatactccacccgttgaactatctcgaccgacaagaccggtcagaccatgttctttgctatttatacgataaccaagaatttggccagacgaagatagcttgtttaatttgctcctgcacggtgtcattgtagctcatttatctgacacgagggcctatcactattctgtagtgttccgagaacgccctggtgtacggagacaaaggcctgatgatgatcccacagcagcagttcttgatgattgcagcactgttgaagcttttcgttttctctcaccaaccattcgttcgagttttgcaggaagcgacgttcctcttccaagcgtatcttaccggccgacttgatcgtgtagcactcccatagacacagatagaggtcgagaaggtcgacggcagaggacgactttaaagaaggatggctttgtaggatctgagacatgttgctagtcaaagaacaggctgcaccggccggaattgtctggaatgtttggttagagccggctataagaggtgaaagagaaacctaacgcttgtcttgccccgtgacgctcgtttcaaagagtctaatacctgttccgatcttcctggcatgtcaacggggataaaaaactgatctggaggttcacgttttcttttgttggctcgtccagactgagacggagaagcaggagagtccattgagccgtttgggttccaaagctcgtcgctatccagattgtagaaaacagggataggagagaacaagctcgggtaaactgtatttttatatcaatggtcaaggagattatgatacaatagactaggtcctacggagattgtatagggggcacgttccagctactcggatgataaacacacccgcatgaaatgcctcattcaccaccaggctcaataagaggatgccttgctaagggtggatatccttgtatttccccttgacgacgccctgtcacgatcgtataaatgagggccggcaaggaatcgcgggtgcgcacataaaccggttaacatttcgctgaaattgcccgattttacaggcgagaaagctacgaatatcttggtcagggctgctagttaatgatgagtacaatatctattggacttgcttttattaatatctggtcaggcacgacgagttcatacacctacagtgggatactgtaaactgaaatttagaggtgcaaattatatattatctaggtagcaatacgagtgcggcagatcatgatcaaaggcaaccgccttctttgaccaaatccatcatgggacgcgttgcgccgcgtagtccggcgcgaaccacaaggaaaaatcaagaaagccacatgcagacctacaactcgtacggtgactccattaacccaccccctgggcatgcggacagaaaacgagccccgtccaccataacaccatcccaaatcgaagggtcactcatatctgctgaacaaaagggcagccgcgtcgtatcatcgaatgcaaggccggcaagttccttgccaccgccctccgatgaaggatagacacgacgcattagaaactgctggctcctgtatcgatcaccgtgagagaagtccccaaacgcgagaacctgcagggccggcagtccgtcggggccaaatacccagtctgcaaatgacacgaaatcctcagcctctgcaattgccgcagaagacataagcactgcctcctgcgagtctacaaagtcgaggtgtgacctgtcaaagtactcatcaacaatgggagggtagttgtggctatcattggtgacgtcccggttcacggaactccagcacgaacgaggatgccatgaatatcctttgcgcatcccatgtaggtaagtggtaatctctcgtgggatatctcgatgaaatcgctcgaggccgctgaaccgcagatgtagaatctgaagctgggaatgcttggcagtaggtcgaaggcaccgacgctgttctcattagcggcactcgttactggaccgaggaaaacttacagccgcagacggactagcacacaaagccagagcacacacctggcccaggtctacaccggtagacaaattcgtaacccaagcgggcgacacatcccgatcatcctcaaataagccatcagcatcgattggtgcgagttggcgctcatggtagacaaggcttttcaacgtggtctggtggtgttggatggtgtcctggatgtgggattttgacgatgggaaattggacaacctcaaatgcagatgctgcagcccacgaaatgaacataagaaccgcacaacagcagaaaggccacatccttcgcccggttcgtgcagcagataatcgaaagagaattcgaaatgcgtcagtcggagcggcttctgtgaccaagacagtaattgcacgagatgcaactgattcgggcagtcacgcagcgtaagcgaccgcagagagtagaatatcgtattgtgtcccgatgagatatccaggggcaaggtcacctttgacaatgacagcgtggacagagcggaaagagctgtgggattcgcaatccccgtatcctcgttcgtagtgacgccggtccctctacccccttcctcaagctccggtcgctgaagcccaaggctctgccagcacagagcacgggcaaaagccgatggaacgaagccgatggacagatgatctaggcagctccagttctgacggatgcaccgtcgcaacaaatcaacctcggacggatgttggagtccttcccactcaaacgccgtcagacaggttagtctggacattccttccaagcggtgcgacgtttcagggcaggtcccatcagtgacgagtgagagacgagtgaggcgctgttggtactgactgagatagccttcctggtcaagaacccccactggaacacatgtccccagtcgccatctattgttagtcagccacaggtctagtcgataggtatcgcttatactgactcaaatatgctcagtctattcggctccaagtgggtgaaaatcagctgcaattgatccttcacgtcgtccaggaattgctgatgtgccgtcgcatcatccgatgctcccagcggggccggggactctggcagccccgcggcacgaaagatgttgtagtatgcacatcgattaaaccgaacaagatggaatggagccctgatctgtaggtgccgcgtgtgctggagatagtccgcggctcgggaaggaccgagatggcgaaagaaggggtcgacatccaacacattcagtgcccattcacttgctgcacagaatgaaactgtacggtatatccgaggaaccaacactgcatacaatctggacgaggcgcggctgagaacgcgcagagtggtaactggcagctgacgggcggtcagtacctggaccaaacaaaacaaacatgctgggcttacccaatctgcaatcagcatcagaatctcacacggcaaggtctccagcattgtcctctgtgctcacttcattcatccgctccggacagcaagaggcttataagcacgcatctatctgagcacccagtcaagttgcacagacattgcgcagaggaaaatgtctaaaatctgtgggtcatgcatggcgttggcaagctatttcatccggtcactgataaataggctcagtgccgtttttgcagccgctcttcacccgcaggccgccaggtcttgtgaagcgcgttgtcaagctcaatggtcgttcggcatgagcgacaagcaaccaactgaccacagcggtggccatggtatcttccccgaaattggcaaccagaatattgaacgacgagtcgtgttcgagaggaattaataagaacgttcaaggggagaacaggtcatgtcggcgcacggttcacgtggggcaacggatcaggtggtggctgaaacggcgagtgacggttgggacgattatgttgcggtccacctgtacagcaatttcgaaaacagtttgctcaagtgccatgtcctacaaaataggtgacagtagtaggtcaagcgagacctgcgttgacccggtgtaaacatctaacatttacatgtcaatgggcattaggccgtttacttggagagaaaatagaagtggaaattgcgtttagggtgcaatcttcgtgtcggcttttcactgagattgcgcaggtttgtcaccaggactaaggcactgggtgatagggtttacctatagggtggtcggttgaccgggcaaaaaccacccacgtctactgtcgtgcaagaggaattgattatcagcacatacagggtgaatggagatatgagctgcgagacccacatggtatgtacgagttcccctgaacgcgaatagcgacaggcttcctcgcgttacgcctgatagagtattcaatgccgactatagttgttcttaattgattgcttatctcaagacgctacatatactatgtatacgtgagcttatcacacaaacaataaattagtctgggaggcagtttgggacgtttgctatacgatacgggggttatgtctcggaaatatatacagattgtcagcgatctgaagtacacaagatcttggctatcacgataaattgtgatcagatgaagaacattgaatcgtccagatttcaacaccagggatgtagcctttttgatcgacatggaaggaatccaggcaagggccagatatgagaggtaattaacaaatgttctgctcacgccgactttgtagtctgccacaccttctccaggacccaatgaaccttaagctgtgttttgagccaccgcatgcaagacagcacttgaataagtgacggcattgtaggccaggactaaatgcatcacatagaggctgggccgccagccatttaccacgccaatcctttccaacggatgaaagagatagaatgtagtgccaagagaattccagatggccatttgcccgtgatgtatcgccaatgagggtgcactctgggatgtcccagtgagggcataaatggttggtatgagcgaaagtaagcccaatgaaacgcagctgtacggaaaccggtaccgcactgcacagcagcttggatcgcagattacaaaatccaccagaatctcgacagcaacgacggtgaaggcagatatgtatccgagctcgaggtagggttcggtgcggaataacacaaccacagaaggaacggtggctgcccaaatcaggactaaagcggctccaaactccagcttttgccactctgccgcatcattgccccggaaagcatctagaaagcggtagaagacgctggatgtgcaccagaagatgacacctgcgcaaaagactagcacggacagggagtccaaaattcctctgggggatgaggggaaatagaagagcagaaaatggatcacaaaaaggtagaagtagagcaatacaaagatattgattatggtgatgattgcaaaatcgtgcaaggactgcgcttttgggtcagccatttaggtcgttggtcgtgtacttgttggagcgaggacatggggaaaactgagcttttaaggtgaatagcaagagcgaagtagctgctgaatcggacgccaccctggcctgtgtattgcccaggacataaccaatgtaacttagtagaagaacatcgtgagagagaaggtcagacaccgtgcaacggttaacaagtgacactaaccagtggctattaaaatgcgtggtcaagagagggtggtcaagagagggtggtttagagagattaagcggtaccagtacagaaattaaccatgctcggcacactggtgttcgtttctggggggcatcatttatgtggtggttagcgatagcctatccttttgcctgggctggccagcttaccctcggtctatctcacgctcatcaataactggcacatactgaaataatcaaacaatagatgcgctctgaactgataattttgcttgtctgaatggacacgtttacaaagctggtcaaaagcgccagtaattgccacctcaattctgcggtccagtagcccacagcttttacatcagtatttattcgggcaaacacagtggaagtttttcgacagatacctctggtaattcgaattcctcaaccggcccgaaagaaggcatcgcatgattgttaaaatattccccgactagttggcgccaagcaatgactctccacgtcctggatcttcagcaatcgagttcttgtcggaatttttgcagtataagattatcaccgctgccaatatgacaaccaccttcccacatcagataacaagatcagcagagcactatggaggaaatcgtcgatatagttcgacagatcggacggcaacagggagaaaatgtgtatttccgaacctgctatgcccttttcaaacacctccaggataaggccgagcaagcgtcccaggacctacttcacctacaccaatccggtgcttttggttcctccgatgacgaattctaccccgtctatcaggtcgcacaagagcttcaagtctcggtgcacgaactggctgagcaggcacttaaggcgcagttagcctgtgaagagttttgccagttggaccccagctattcggcccgcgaagctttcaaatttaccgacaccgtacacacagccggaaagactgaagctgatgcatcccagggtatctgcgatagcccccggtcgatgcggtttataatgctaccagtgaatgacctctaaataaatcccatggatggctgcatgatcgcttcgaagaacattgtcttgcaacggaacatttgatctggaaagctcaagctcgaaagcggtcataatcatacaagttagtaatattagcctattggcttcttttgatatgatgtcctagacctgtagtcctagaatacatagaaggcattgtaacagtatgcctagtgtcactaaaacagagtttgagaaaccattggacagaacaaatggtaaaactgattccgacccgctttgtaataaagcggcggtggcaatggtgtagttggctagtactttgaggcgacctgcaggactcgttcacggaagaagcgattagagaaaagagtgagagaacagtctcaaagataccgtatcgagctctaagccgaaaattacaaagatcttcgcattcaaggtgctcagcaacaattgtgacaagctccgggctcaggtagtcaatatttgcggacatattgagcgtaaatcaaacgcctggggcctgtcggggtgtaatcagggaagaccgccgatgagggaggggcacacgtatgtgcaacagtatgggtattatgagttataggtcacgtggtaagggcttatcatacagttcagtattctaaattcagctgaactaaaggtagacttgtagtatgtttcaaggtagagtttgggaaagaatcaagagtaaaatgttgaaacttattcttgaaactaatttcgagcgtgtctgtatttacacaatagggtagcctgtacatcgccaaaatcaaggagtcagggtaaatgaaataatccatccctgtggtaaagcatctgacggaaatctggcatacaacaatgtatgtaacctcagtggtagtgaacctctaaaaaaaacatgaaaaaaccgcgatggttaaacaagccatgcggacctcgatgactaactgtaatatgcacttttgtatgatatggttggtacgtaccatcagtcacatgattttctgagtattttatcctgtctcaaccatgtattcgacatcaccttctgcaatcataagacattgtggaaatctacaggtaagagatgtatcgagattactttagcaactttcatctctcatattctttatcgaagtcgatcctgtaacactgtagtctacatctaattaggcctgtgtacgtgtttcctagcttgcccgcttgctattccatatccacatcaaatgcagcagcaaaacatctcaattagccatgtcaaaagcgccgcaaaagagaatgttactgctagccaggttgcagcgaatgaatgcgccccgagacttgcatcggctcccagagggtgaaggatactctgtatagcacccgtgatcaacccgtagattaccgtaacgccaatggatgcgccggcgacaaaaatagttgcagactcagcaatggtcagcttactttatccagaaactaatcacagggcccttaccaaggaagaaatgatgagcaatatttttccccacgaaaaaaacattgtggtgactccgaagacaacagccacaaatgttgaaacaaaacccaagatgtaagctgagattgaccaccgagaaacaccgtgatatccagcaagcaccttgttattcccatctggtagtatcccgtcgatgactggggaagccgagcccaaaatgctcaacaagtcgaacgagaaggaggtactgggttgcgagcaattggaataagatgatgtttccttctggccttggcaatatccccaaagccccacagaatagaaacccggcaggtgtgagttgatttcgtctgataaagattgaatcttatcggtcacctggctcgctgcagtctctgcggcgcccgaggcataaattacagcagtagaagcgctattcataacgctgttggcctcactactggctttgtttgcaacatcgattccgtccatcgcggcaataccgagggagcgacgaggatgatcgctcccaatttctggaaaattggtcaattccacctattattttggctttagctaactattccttgagttttatgggatattagctaccttcaagaagtacaattcattgggagaagaggtcgatgtgcatcccgcaaagataatggctaggcaggctaaggccgctatagagaaagccaagggaagtattcttcctacgtgttgcagcattctatttatgccaccaaggaatctagggaagtcagtgtcaagggtattctcaatgaaagcgccccgcacgagcatgtggaaaccatgtgctctttatagaagcgttaacatgtggttgatgtcagaatagaaaaatatattaactcaaagtaggggaactcaggagccatccgtcgaatgtactcattgaagtggaaacggcacggccgttcttaagtgctgttcgcggttggcaaaatgaccctcaaattttgttttcagccagatttggcttaatgtgatagacctggctaaggcgattgatatcacattacagcaggttttactggaacgactggggccttaacagtgagtgaacggtagagaggataacgcctgatttctgaggttagtaggttagctggggcggcggaaatcgactccctcaacctcctgtggggaaggctaaccaccattcatttcatacaacggaacgtataacatcatcagcctaaagttgatgattgctacgatatttcagacgaaatggcaaacacctaaaaatggctctttctttcagggtatttaaatagtcccacccgctcagcagacaagctcaagcatacaacgttcactgcattacaaaatgacacgcttaacacaagcccaagtggaagaagccgagtacaaagtattcacctatcgtgaggaacatttcaaaatggcagcacgggttgatatctctcgtctcgtattcgacaaaaacttcaagcggcaaatgagcaaccgccaaaatatcgctcgtcttgagcgaattctggacactcaagggtgtcaacgcctgatggaggaatgccatgtacctgtattgattcctgacagtgattggcaacgtcgcgttaggccacggctggtagatggacaattccatcaattggatgtcgatatcgactaccagctgcgcggacaggaccacgagaatttaattattgctgcccggaaaaagctcagctctagtaattcatggtggattgtggatgtttatgttacagggcagacaggtgcgtgaagaggtcgctatcccccagaatatctttgcctgattacattttagctggcgaagaacctttacaagaagaatttgtccgatcactccgggaacgcttcccgaatgatcaaaggcctccggatgggcttatatatgagcgaatacggtattatgaaggatatctcgacggccccgtaaacaggatcgcagcaaaccattggtgggctgccctggaaagggttcctggaagcaaaaagggaaaatatctgcgggcttttctcaaacatcctacactaccccaagccttcgatgagctgctccctatagcgggtatctgggagggcatgcgaatcgggctactacacaagttggtgtcaatgcgctgtgatgaggtaagatactgaacccaagccccatgaccgaaaggctaagtggatgtatcagcctctcctatgctaccttaaccacataaaaagcaccttttttggcttaatgggggacaggcgggatcttttggcgcaattagacggcgtgtccatccaattattgaaatcccgtgtgcccaaggtctctgctcgggacttgcggttcttggaagatcgaatgtcaaaggaagaattgttccctgatattgaaggtgttcaagaccgcactgaaatttgggaacgactgaaagagatccagtaccccataccgacactggagacatttttcaaagacaggatcagtctagaggtaggccggagtgtactacagcaactctacattcccgatccccatcggaagatgactgtcgacgaagaactcggggaacgatattatacaagtgtccctgtaatgacttcaaatcgccagcatggaattcggggggatctttatgatttctggcggttcagctttcagtatggattcgaaatgactgatcacaagcgccgcacgcggacaaagcctgggacacaactcgcgccgacacccatggaagaacttcacgaacgacagaaactctggcaacatctcttttggcttgtcagagaaaaaggctttagcacccctcttgtggatggactaccggctcacccggttgaattatcccctattacaccgtgtgactatcccgcaagtgtggaggaagacctaccggtggaaagacgaaatggaacgccatataaggactcaatggaggcagatcattttgcactctcgcgggaggtattggaacggccctggagctccccccgagttactgcaggatttgctcgacgatcggtgtttttggcatatttccgctatctcaaagtcgaaaatggcagtcaatccattcctgaagtcgaaaccaacgaggcagttcctcaggaaccttctttgtggaacccaagctttgatgacctaatacaaaatacgatcattccaccagaagaaaatgaagcaacggtgttccccgtcttttctaccccgcagtttgatcccacctcacttgctccagccggggatattcagccgccgagccgcttcagtatgaagttcatcatccctggtgagcctgacaaagtcgtactgctaccaaatattcaatccgctttgaataaattcttcgaagggttctcaagatatcatttccatatatattctggcgataatccgacacggggtatctacgggagagattgttattcgctgtacttagggaatccgtttctacttttacatgccgaatacataggagcggatctgtctgaaacggtgtttcacgggtcgaccgaccagcaggaaacaaggacgaccaaaaagcgacgtttgaatgagaacgaacaaggtgaacttatttctgccaaagaatggttaaatgcgagcctggatgagttaacacaagaaattcctgaaaatcgagtcgatatggatctccccgggggtgaagatagtataacatgaatatgactgtttcggccttgctcgtgactcctttgtgaattccgttgtggatgggttggtggatcctcgtattggcaggctgcgctttgtctcacgacccttgtccattcgaccttcccaaagcgctcagaagaggcaggggaaggtaggcaggtataaagggtcgttgggagtcctcactgggaccgggaaggaggctgactatctgtttatagttccttctcttctattctgatgcattgcgtctgaatctttctcgcggcatggcaccgatcaatctggacgacgtcatccattatcgtccgcctgctaaaaaaccacatttcaaaccgctccgggcacccggttcccacgatcgtatctattcacagatacctttggatagacccgcgccagctattctatccagccagcactggtgttcgagtcttccattctcggggcatgcgccgtaccttcaaagtcatttccatgcacccagtgaagtcgagacgttattagcccccaacgagcttgcggaagaagtgaccattgacagctcgaatgagtttgacatggatttcttgaatgcctcttcggaaagagatgcaaacgttgctatatcaaatatacacacggcgagtcgagaattgccggatgatgtttccagcagtgatttagggcaaggtttatccgaccagcttcacgatggtacgtggtgaccatcattttgacttcccttgatttcttcaattcactctgttgaactcattgtgccctatctctctttccttaacgataaagtgttcgacaacagagggctgacttcgcactttgagaccagacttccaaggtgacgagcatcatgagagcaacgtgacatcttcttctcaagatattattcaggggggaggtcttgagcaatccacacctttatactctacatcggtccgtgatggcctctgcatcccggtggcggagggaaaaattctaagccgaacagaagcatatgaaaatgcaggtcagtgctctcagtcagctaggttgcccagtcctctggctcacgtggtagaatgcagacgaattcacgatggagggagacattttgcgacattcaaacccgacaatagatatagcagacggcaatacaatggtcaatggccaaattcttgaccctgcgggccaggaaaagcaatccactccaacgcatttgttgtccggagatgcgggaattgaagcagacaaattaggattgaaaccggcagcttgcgtcatcggggaaagcatgccagccgaggagtacaacagacagcccgtttccgaaagccaagtggttattggccaggagaaagacagggctgcagcccatgataacaaaggcgagctacagcatcgtcatgcggagagcctgtcagcatctccaaaacctcgtcaaaatggaacactggcgcgttcaatctcacccgcatttcaaaacagtgagaagcagtcgccatgcagcccaacagtggaagttacaggattctgtccagtgttagatcaggccccagtgttagaccagccgtcggtcgtcatctccaactcccgtccccaaaagcgaggaacgaagaactctgtctcaataacacgaatggcctctccgaacagaaagcgagaccgggatgagtatatatccgatgatagcagcgatgaccctgatggctccgacgatgcggactacgtaggcgaaagcggtgaagacgcacatggaagcaaggttccttcccatcgactaaaaagagcaagacgacctgccatgcagcttaagactagacctccccggcagaacattaaacgcctctcggtcgatgaggcaattccatccaaagtggccgcagatcagacttccctaacaagcttgcacgaaatcgaaacaattcctatccgaggtttccttacgcgacagatacttttgccaagggtcatctattcggttacctttgaagagcaggcagagctacatcacaatatgaaaacaaaattggcagccagcattccaagcaatcccccaaaaaagggtctcgcgctgggaaaatgactaggccaacccgaatcctatctaaggacgaccagcttttgattgaattgaaagaagagcggagcctgccatggaagcgaatcgcagagtattttcctgaaagatcggaaggctccctccaagtgcgctattgcacacgcctcaagggccgcaaggccggaaattctactgggcggtgttccaacgcgagaagcgattcttcatacagaggcggaccttgcgaggcagttcaagccgcaggtggcaagagcaagggcaccgaagaagatgtgtcaagaccgcgatacggtccacctcggcgcaggcaaacggtggaccgctattccccggtttgagttggcaatagttattagtctttgtcgaatatcagggcgtactatatatgctgctgctgcgacaatcggacgttccgattgttgttatgatctttttgcgcaatggttgaatcatcttatgtaattataacaaacgagatttttatattccctgctcaagtttggcagtcgtcagttattaaactcaccatttctagtttggtatcactaccacagactaggcgttgtcgtcggtttgtcaacaatctcagatcattcatcgacgaagtaacgtgaaacagttagcgtctctgtttccaaaccccagagtaatactagtccaaaaatggaataccctgccagtaagagcttgttctcatcagatcaaaagagattcgaattacatgtatttacccgttcgcccataaaagcatgtgcctcaatatagtacggatggacgaatggttcgaagttggatcccaggttacgtaatgtatatatgtctgtatgagtggctccctgttaggttgccattccgctaggcagaagggagatgagttgctgcggctataattagctggatcttttcccaagactggatataattatcactcttgtacctgaatccaagtttccaacttcgacgaggggccagggtaaatgaaatcacccatccatccatactgtatccccaccaacacaatccgcttaaccccaactccagccccaactcagcaaatcaaacccatcaagacatcgttacaacccaaagcagtgtctcatgtatcggttttgaaataaaaactaaataagagacagaatagaaaggcgagtgaaatactgtaaaggcaatcctcaatacttctttctccccttccccttccctttccccctgatgttcaactccgcaaaccccaactcctttaacctctccgcgagaaccgacgaatcccgcatccccggaaaatccttcgccggataaacacgaaacagatccgaccacgcctctgcaagaataggcatagactgacccgtatcctcaaccgatccccaattcattagtctgaattgaagccggtacgttccagccgatcgaattgaaagatcagtgaagatgaagaatgtggccggttgatggagcttcgacgcttggtggttgttgtcggggtccagagccaatgaagggctttgtgtgtgggaggaggggtgtgtaggggcggaaatggggtctggatctacgtcgacgtagaatggggacatgaagactttgcctaagaggggtgttggcaagacctcgtctgcgcgggttacgctatctctttctttttctctttctgggccttgcttgtcctgggaatgcagctcattgaatgagtctgatacgaggaataataagcagccaactgtgaagcgtgggtcttgtagaatgtcacggtcatcttttgattggtggccgaagtctgagaggaggatttggactattgggggtggatcgacagggcggcgattccagtcgctcgcgccgcatgctcgtgaggcgaggggctgttggcggacatggaggtgatagcgggatagtgtgggttttcttcggggtggtggaggggatgatgattcgggctcgtgatggaggagttgttcgaagccatggggcatgctatactttgtatttcggggccttgttgcctgcgcgctagctagcgctagtgctggagactgagcttctataaacgcacactggcttttctgagtaagcctggcccagtatagctgttgagctgctgctatggctgtatactcttgcgtgtcagtacaagttcctgtggtggaagaactcgtgcaaaggctcttcacattttcaacatggaagaatcgcttgaagtcggcaggcatgtacgggtatggttggctagcagatagagacggctcaatcgaaaataataacgaaaaggaaaggactttaccgggatttcaggtcgtgtgtctgcacccgaggactatattcgctgccgtggctcatcgcgggattcaatttttcctcatatggagcagagaaacacccacaccgctcacaatgatgcatttgcagtggcaattcacgcggcatatgtggatggttcatgtaggcattctcttgcaaggccatatgcctagcgtcgcttctctctggaagatgccctattgacggcgaccggggaccaggtggccctgccaatattgggcggtcatagaggatatgcggagataaaaagtgtcgaggctcgtgtcgcggatacatatgatatttcaaaggcatctggccggggtggtgtgggtgagagaccgggccgatataagatttgccgggtgtgggatgcccacattgcgacgacgggggtcctcggcatatatacaggacagataagactggtgcaggtgtacaacagtttgcgcttataatcaaagcaattcgcgcgggattcagcttgtaggtgttgaagacacccgcgggagtaatcgatgtctcaaaaatacaagtcttctttttaaatcatgtcaaagtgcaggtgactgcagggaatcgtgtagaaaagaaagatatatatcttggatctgcttggcgccaagtgaaggcaactaagatacatatactggatctgcttgccgccaagtgaaggcgactaatgaaccgctgcagggtgcagcccatcaacaacgtggcggtatgggacccatatgtaggggcactggataacccgttgggggtggggcaatgagcgcgacacaagttttagtgtcgcgctcttacttttcgcccttttcagtgtattcgcacgccctccttaaggagacaatgagaattgccttgatcaccaaatggcagaataggccactgatctgaggttcggcctataagtagcgacatgtttactagcctgtcaggttagtaagccagcgcggtcgccagttaatggacaaatgaccggtgctcacaatcgctagatctcagcctctgtctcttatttcggtcttcccagaccactccgtccactctccccatattacgagtttgtttaatgggaagatgcgtagcccgaagtactggctagcttattcgatgcggatggatgacatgttgcgtgtgtgctagaagcacgaaagtttcgttaccatgtattatgtaaccgactgattctggtaaacgcaccaaatcctctggtgataggatgtttcagataatctcgaccctaacgatggagcatatccatattacccgaccttcttcagaagacattctagtcaaccgactgtattcctggctaatacaattcatgccaatcactcgctcatcgtaaggggaaagacatattggaacctccccgccttcaagtattttcatgataccacccttgcctctctgggctatgtctcgtgacgtgagaccattatggaccattacagatacatctgctccgccatcaagtaaagctttggttgctgccatgtactcgagctcgactgcataatgtagcgggcttcggctctgatcatatcaaattatagtcgtgtcctccctggccgaccaagtagatacgatgcgcaaagggtttcagcgccagtcccacaacgaacactcaagtggcagcgctaaaatagaagaacacatttccctcctgcctcatgctctgacggtgcaaacatcaaccaggtcgactaacgcagtggtccatgggtctgtggaccttcatgtgcacacagcagtcgatctggacaggaggctttgcctgtttttccccgtcccgattcgatgaccacgccgcgtgttaccggatattggtgctagagttcgaggacgcttcagccacctcacgtcctccaagtcaatgacaaccaaacggccacccatgtcatcccatagcatattacgccattcgccatcgctatggacaactccgtgcgatcggagcacgatcagggctttgtcgcgctcttcgtgaaagaagctagaattctcatggttgatgacatgctgaagccgcgttccagaccagctcaggatcatcatctgggtcattaattcaccatggtaccaatacgagacccgtggctgaaagtctccaagacagacggggatctgatgtccttgtaagctcctgaggtgacgataattgttcacctcagcttgaaggcgatgctgcttctccactgtggtagctttaatgatcacagtgtatccatgtgatagaagggtagctttcacgaggtagcctgtccgaccacagacgtgcaactgttcgaacccaaggtctcgatctcgggtaagctgacgatgaagctggcgtgtgaactcctgaggtcccatggagtgtctctgaccaccgtggtgtttccagttggggcattttttatccaggggttctcggttgaccatgccgcggatgcaggcgatggtgcagtatggtcgtgtagaatgcccgtctttccgagaagtctgtttgttgtcacggtcgactcgtgtcctttcgcttcccctagttgattgacggttgttgcctaggccgcggctcgatcggctgcgcgatgctgctgcggcagacggtgaatgcgattcttgatcactgccgctgctttcagtcgacgagtgcttcggtgtagatgcgcctggttgacaacgagcgcgagcgcgagagcgtgtgttgtgtattttctgatctcgtttccagcgtgagggccgataattagaggcccgcgggtctttacggagggtttcggggatttctctcaacacgtcgagatattcgacctcccaggtcgttagcttatcgtgtgccgcatcgtgccattcttgagtcggaggttcgacggctagcgcttgaagggtgaacgcaagcacctgcccgatggcggtccggtggaggcgcaattcatcgtctgcctgcacgtcttgatttgggatacacaagaaatattgaacaattgtgggatcatctttcgggatatggaggaaaacaaaggcctcccctgtgcagatgtagccgtaccgaactccactgtcgatcatgtacgagaatatctgagtgaccacagcggcgacgaggcgggtggcataaaattcgaatgtgtcgccctcctggtcaatgacatcgctagccagatccatctggtgtagacccaccaccaattcggcgactgttaccttgtgcggcgctttaaactccactgcatacactggtatttgtcgttcatcagccgtaaggtgcacgcagaactggtcggcgcgccgattgcgtcttcgtgtagtaccatccctcttctgtctctccgccgctcctccccctcttcctctgcctcttccatgcctagtgttcgccggtcgttggggtgtccgcgcgtcctgaagattcatctgttccaggctgttctccagcgaagtttctgatgggtttgcgcgatcatagaaggtgacccgaccttggattctaaattcctgtcgaagaggttcatcgtctcccaaagccttaatgaccttttcgacaaagttatccaccgtgtctcgctcaaaattccgaagagacgcttccgaatagatcggcctgttctggatattcgtaacgacataatcgatttgggtatcagaagggaatagtgggcgcgaggtaaagccagcggtgcggtcgaatttcccccaaacttgttcttgtagctggggaaagtcaagccaagggacaatgtgcttggggtagagtcggttcactggatcggtcgcgtcgccctgagtcgtgagggtcgcatctgcctcaacttggatcgcttgggacagaaaattgtggcagcgatcgaggaggcgagatagtgtgttgggttgcactcgccgctctgccgcttcccgtgctagtctctcttcctcctcgcggcgctctgcctcttcccgtgcttgcctctcgatttctcgcgcctgtctctcttcctcttcacggcgctcagccgcttcacggagcctttgttgttcttcaacctgacgtcgtaattcggcgattgtctcctccatccctggttgaaaaaattattcagcagataatccaactaaacaaattgaagtcaacagagtaggggccccagctggcgcggggaatggaatgtcacgggagatgggcgtctgcttgtttacccgcttactcacccgttagctcagagtcaattagtgcctcaggcattaaaacacgttgaactttcggttggtttcaggcattgtctccaaaacatgcccgactcgatggtatctagatttgcctcgtcagtacataggtaaattcggtcctccttccaatcctcaaagtacagtcaccgtagcgagacgactatttcaattgcatcactcgcgaggcccacttccgtcctccaataaaggccatttgcttcgaaggatagctgcgttgtatgatctcgctgtgaggaatgcacaatgaagctagtagccagcaaaagctcttctaaatagagaataggcttaccttctttcgttgtccgtctgttctgcctaacacgctactgtatgctctaggctttgggggttagacatcatgcagtcattatccaacggacctcatcgacaagtaaagacgtacctgccatattccttgtcaggaacaggcttgcttgcttaatgctgatggtccttgattgagccatcaggccctgaatacacatcggccatttcgggggtgattagctcttatatattgcataagatgcctagtggaggcgaggtcttactatccagaactgcgaactccaaaccgcgaactccaaaccgagaaacttcaaactgccgacactcccactcctgcttaactctctaggctagccggcgacccaataccgtagttggcagcgctatgaaggttgcgtatggctggcgactcggccaagaaacccattttcaggccatttttggaatgagtcagcggcttgccttccattccagctcgcctgatctcgattaaaggcaagaccgcgggaccactaatgacgcagtgacccctctacggttcagacccgcatccagccgatgattggtttacaggaagatgactaaacatgctgttgtgacgtaactgtaaatatttccccagagagtgtacgaagtacgtaagtggaaaattgcaactaaattgctattcagaaccgcgaactgcaaactgcgaacaagccctttgaggagcaagcaaccgttgccatactgcgagtccagccaagcacagcccgagcgtagagcgacagtctgtggagcgttccccgcaattttaagggacttagagcccctatgaatagagacccattggcctagaggtttaacaacggaaccaaaggacgtcccaggacttcgttatggcattattgtaaaattggaaacggacaactccatgtttattgggtccagaaggctgactaaatataatggaacaatctagaacattgtaaatttggaaaatctgtgtggttttaatatgtacaactggggtgtcaatacttcagtggtagtaaaataagagaagtgaaaaaaaaaccccgtcatcagactggttccattggtattaaatctatcgtattaaaacaagagaaaaatccaaatttggccctcagggaccgccggctctgggatcccatcccacttgcagttcctgggttctgggcggttccggggaacgtggttggtgttcctggtagcccctgtcagagatcgagcatatatagtagcttgggtgtttggtcgctgaccaaacattgtgcctttttggccagatggcgtagtggtaaaacccaagcacccatgaaccgtcacagtttcttgaggtgtgttctgggatcacttgatccgtgcctaggagcgcgtctggcgttcctgggctgtggttggttccggggaactcgatcggcgtttccgggaaccccacatcttgttcctgtgtgcagctcgagtatcttgcatatatgttgaacctgtctaaaaaagtgtcatgtagaacgaaaaagatctggtatcgatgcgagataggtaatcagaaagatagagatgccaagcagttgcaagcaaatgaagattaactatatcagtttgttcaacaatgtgactaggctaaaacttcttcttgacctagaacatggatgcctattggttttgttcgcgagttcggatccgacagacggctttgcttcgatttccagtgaccacatcattttctttttgagttggtcctgttggaacccggatttccacttgcgtttgagaagtaatgatcgaatttaacacaaagtgattgaagtcagtgatttgcagcttagattgaagcgctcacattagcgatacagacagagccttcagctaaccccgaaatctagcactaactgtcatcgggagcacacgaccaagttccgccttaataatgacaccaacagaactgtcgatcccactccagatatctctaagacttgggactttgggctgtttatgtgcaagccttcaattcttgttgtattacgaggctggtgcagatcaggaagcaagtcgcaccattagaattaatcccgtgtttacgaaaatgataattaacttgatgttctcattacatacagcctcgtgtttctcctgaaataccaatcaattttttgaattacaacatttatgaagctaatgtcagtggaagagatctgggttatgaagatacgaaacgaaacgagggtacagcatggatcgaaatcagattcaccagctacacgcagagattctttctccctcttttgaaacgtcgctatacctattacggttaatctacccccgaaccccattcttggcagtattccagtacgtgtgtaaatgacagcgtaaaaataacatccgtaatgagcttgtatggtttcaacggcctctagaacgttgatcctgcaaaacaaagcaacaaaagggaaatccgctttgtcggtggttatttggccagaattcaaattcgcttcccctcaatatctcatcctccacagctccacacgagtcctctatttgcaaagccagagatgttgaagaagttttaaaatgtggattctgatcaagaacctctttattgacagccctacgcaagctaaatttcctgcgactccggggtggctccagtccaagtcatgaattgcccattagaaatggaaccttacaaaatctggatcaatcaatcatggtgtcagaggataaccaggtggtctaagtctattcctaggtgtcgattcaccagcaattgaaggatgaaggatattgcgtagatagccctggaggtatatattcctgctttctcatatgtaacatcattttaaatgttgagcaatcacttagcaaatgccactaatccccagccgacttataaaccgtctgcatgatttccaaccttggaaaccctgcccaatagaggctcttttacccaagtgattgcaatccatggatactgtatcactttacggatcagtatctcctctgaacaagatccactatacgaccaccacagtgtctattcgaataactttcctggaccggttgcccaagctttgccaatagtttccgcagtgccgcgcgatcctcatcgtcacattctggtgacggtctccacgcattctcaaggtctgcgagttctttgggatcctcaccttccatataaggcgaagggccatatccatcatagcagcacatgtaccgattgtaatacagcccgaccttgatatccctctcctgctcaaatggaatatccgggtaccagttactactgccgattcggaagtgtcgcagttttggtagtttctctgcaaatagatcgaaaatatggtgccatcgcttctcgaacgaaccatacaaagactcactgccctcgcggcgcagcaaggcatccgtaggtagagcacaggcgtctacattctctttcatcatacaaaagtcgtagaggacggcgcagtcatcgaagtagatttcctcgagggtgtcgccatgcttcagaatccagtcgatttggccatcatggaagaaacagaagtttcctagtgatagcgtcttcaggcgtggaaagaacagattggatagatccaggtgagggtaaaagcccgagtattcacgcgagcagagcgagagatgttggagagaaggcgcagcgggactcagccatgtcctaggcaactccttgaaaaacttgcggatttccggatactgatatgtttagaaaaagcatctcgatggaggatggggtgggttatacctcgagatcatgctcaggagcggcgtcatttgtctcgctggtaatgcttaggcgaagggacagtaggcccgacaggaccttttccattttcgcaagtgttttcggatctttggggttatccgcttgcaggttgcgaataccaagatcttggattgggtgccgtaaggattcgagaagagagaagagcttatgcattgcgtggaatcgaaattgaggcgtctgggggaagtccgtataatggaggtaatcccgatccctgctgtctgaagtaaaccccttatcgaagcacagaacggcggcgttcagccgaggcaattctttcacttgcggaacaagattgtcccagccttgcggccatttttgctcttctccatcatcatagtcctgtgcgcattagttgttgcttggagctggataaagatcatcgtacaagactctcgtccacggtgtctatgtagatctttcgcggagtccaatgtagactgggattgttcaaaatttcttgtaacccattttggcttgtctcgctgggctgcaggtgcacggtcctgaagggctgatcggtggccagctgtgatgtgaaacggcaggattggcgcagcgactttaatgatgaaagatccacattaaaaaatgtgcgagcgagccgttcgctgggaaaattgagaaggcgtgacatctgggcgtagtcgcaggtagaattcccaaattgatgagtcgaaaggggacatgtttcgcttagccctaggctcctatcgtggcgtccaaacttcccaattcggtaaagcctcaataaatcacatgactaaaaagtagactgcggtaggtgatctgattagagacagaagaaattacctgccttgatcttataccccgtatttgccttgagggacgatgtatattttcgtttacactgctcatgagttaaacacgtgaacttaagcgctatcatatgtaaagctgccacggaatactaaatctctgaccgaagtgaacctcacagttaaccgtagcgtaacgattgtatctatgtttaggaaagttacagccccgccatccgcgtaatatatggtgacagaacatttcaagatctcaaaacagactaaagcatagggggtctagtgtgtttcagaataaagttcagaaaagaaagcaaacaaatcaaaggtgaagctgatttcgagcggccctgtacgacgaacacgaaaagtcaccgccacgattattgagaccgagacgcaccaccagaccgcgtaacaactatggccaagagcaagaaatcgaaatccagcagagaaatgcgcgctctcagcagaagaagagaacccggggcaagccagtagcccaacgtgaagcggtgacttcggacgacgcgtcgactgagagcgacgacacgaacgccgccaatcttgtgaaagagctcgtgaaactgaggagagacatcaaacggcgagatgattcgcacagagaggagatgcagaaagtgcaagaagaattgcagaaagtcaaggaagaatttagcgccgcccttgcagaggttcaacaggagctgcagaccttggcagagagaccccttcccgaaccatgcgcgcggaacggccacgatgagatccttcgcgaagtccaatccttacgcgaagaaatcagcacccccgcccccgcaagctccccgtcctatgcagatgtcgcccgtacccccccactcagtcacccgagcaacatacggactctctcaacgtcgaacacaacaccaaccactttcaccgacacgctgtactgcacgatagacacctcgaagatgaccgaaagcgaaagtgagaaggcatccgcgggttcaatcagggccacaatcgagacagagatccggaagatggatgatcacactcactggcgctgccgcgcggtcactgtaagcccaagagataccaaccggatcagaatcgcgtgtcgcgatgaagccgaacaccagctagtgaagaaagtggcggaagcaaagatcggtgcgggagcccgggtgcttcgggacgagctctacccgattaaggtcgacagcgtcaagaggaccgcagtactggatgagaaccatgaaattctgacaggagcggcggcagccatgggtgaggagaacggaactactgtcgccaaaatgacgtggttgagcaacaaggaaatcgcaaagccctatggatcgatggtcgtgtacctaaccaaagggactgatgcacggaggatcctggccgatggatacttccatgtcggaggagaatccgggacaaccagcgtttttgagtaccgaccacgaccggtgcaatgctacaactgccaggaggttggtcacaaggcattccaatgcaagaagatccagaagtgcgcaaaatgcgcgacggagggccatcaccacagtcgctgtgatcacacggttccgaagtgcgttccatgcggtggaccacacgaatcgtatagcaagaactgccagaaactctacccgtcacgtcatgaataggtcactccggataatccagctgaatgtgaggaaacagggagcagtgcatgaaagcctaatgaacgacgaagatactcaaaacgcagtggcgttggcgatccaggaaccccaggcgaggaggattcaaggccggctcttgaccaccccgatgggacatcacaaatggaccaagatggtgccctccacctggagggaagggagatgggcaatccgaagcatgctttgggtcaatagggatgtggaagcggagcaagtgcggatcgagtcgccagatctgacagcggccgtgattcgacttcccgaacgacttgtctttatagcatcagtttacgtggaaggaggggaggcgtctgcgttgagcgacgcatgcgatcgcctgagaaaggccatcacaaaggtacagcgagatacagggacagtggtggagatcatgatcacgggtgattttaaccgccatgatcaactttggggaggggacgatgtgtccttgagtaggcaagacgaagcggatccgattattgacctcatgaacgaatttgcactcagcagcctgctcaagcgaggcaccatgacatggcacggcggaggacacagtggggactgcgagtcgaccatcgaccttgtcttggcctcggaaaacttgacggactccatgactaagtgtgcaatacttgggaccgaccacggctcggaccacgacgccattgagactgtatttgacgccccgtggccggtcccaaagtatcaggaacggcttctactgaagaacgcgccatggaacgagattaatgctagaatcgcgagcaccctggccgccactccgtcggaaggcacagtacagcagaaaaccgatcgactgatgtctgcggtctcggacgcggtgcacaatttaactccgagagcgaagccgtcgccacacgcgaagcggtggtggacaactgacctgacacaactgcgtcatatatatacatactggcgaaatcacgctcgttcggagcgacgggcggggcgaaaagtacctcggttcgaaaggatggcccaggacgcggcgaaacaataccatgatgccatccgtaaacaaaagaagaagcactggaatgagtttctcgcagacaacgacaacatatggaaagcagcgaagtatctgaagtccggggaggatgcggcatttgggaaattaccgcagctcgtcagagcagatgggactaccaccgctgaccatatggagcaagcagaggagttgctttccaaattcttcccacccctgccggacaacattgacgatgaagggatcagaccacaaagagagccagtggagatgccggccatcaccctggaggaggtagaacgacagcttcttgcagcgaaatcgtggaaggcgccgggagaggacggcctgccggcgatagtttggaagatgacgtggcccacggtcaagtaccgggtccttgaactattccaggcgtcgctggcagaaggctcgttgccaagacagtggagacacgcgaagatcataccgctcaaaaaaccgaataaagaaaattacaccattgcaaaatcatggagaccgatctcactcctagcgacactgggcaagatactggaatcagtagttgcagaaaggttctcacacgcggtggaaacccacggcttgctcccgaccagccactttggagcccggaaacagcggtccgcagagcaagcactcttgctcttgcaagaacagatctacacggcgtggcggggccgacgggtattgagcctgatcagcttcgatgtcaaaggagcctacaacggagtgtgcaaagaaagattgctccaaaggatgaaagcacgaggcataccggagggtctgctccggtgggttgaggcgttctgctcggaacggacggcgaacatccagatcaatgggcaattgtcggaggttcaaagcctgccacaggctgggctaccgcagggctcgcccctgtccccgatcctgtttctcttcttcaacgcagacctcgtgcaaagacagatcgacagccagggaggagcagtcgcttttgtggatgacttcaccgcatgggtgaccgggtcaaccgcgcagagtaaccgggaaggaattgaagcaatcatcagagaagcgctcgactgggaaaggagaagcggagcgacctttgaagctgagaagacagctatcatacactttgctcccaagacgcgtaaatcggaccacgatccgtttaccatcaagggacagacggttgtaccccaagaccacgtcaagatcctgggcttattgatggacacgagactcaagtataaggaacatattgcaagggccgcttccaggggcctggaagcagcgatggagcttcggcgacttcggggcctaaccccagcatcagcgcggcagctattcacctcgacggtggcgccggtcgtggactacgcctccaatgtctggatgcacgcgtgcaaggataaagccatgggaccgatcaaccgagtccaaagagtaggcgcgcaagccattgtggggacatttctcacagtcgcgactagtgtcgcagaggcggaggctcacatggctactgcacaacgtcgattttggaaacgagccgtgaaaatgtggacagacatccacaccttgccggaaaccaatcctcttcgccggtgtacagatcagatcagaaagttcagaagataccaccgctcaccactgtatcacgtagccgatacgctcaagcacatcgacatggagacattagaaacgatcaaccccttcacgctatccccgtgggcggaacgcgtacaaaccgacattgatgagcagcatgagtccctggccgaagcgggcgggtgcatgcaggtcgcggttagcagctctgcacgaaacgagctggtgggttttggagtggccatcgagaagcgaccacctcggaatcggaagcttaaacacaaagcgctatccatcaccttggctgtaagggcagagcagaatccattctctgcggaactggcagccatggcacatgtattgagcacggcgacgggactgaaagactacacgatcgcactgctcacaagcaacaaagcggcactgaacatggtagttggagtgaaagattaccggattgcgctgctcacgagcaacaaagcggcggctctgacactaaggaatcctcgacaacaatcaggtcaggaattcgtctaccaactgtacaagttgatgagaaaactgaggagaaatggcaaccagatcaatgtccggtggatctcaacgagtgaagacaataaactgcggagtctggccaaggaacaggccagagccgcgacacaagaagatgctgtgctgcagaagcaggccccaaggatgaagtcaacaacactcaatattgcatggtcccaagcagtccccaacaatgacctgccagcgaatatagggagacacgcaaaacgagttgatgcagcactcccaggcaaacacacccggcaactgtatgaccgattatcttggaaagaagcgagcgtgctagctcaactccgaaccggcatggcaagactcaatggatatctctatcgaatcaacgtagcagacacggaccaatgtgcgtgtggacaagcgagagagaccgtggagcacttcctatttcgatgtcaaaaatggacggcgcactggacggaactactacaatgtaccaacactcaccgagaaatatatccttctttctaggaggaaagtcgccttccgatgatcagaagtggacgccaaacttagaggcggtacgggcctgtacagttattggaattctttaagagtttatcaagttgaaatgatatgaggtttgataatggactgcaatatggtatgttatagctaaaagagagcctcgcgatccgactggttctgacagcctagtagtcttttagacacctatgatgtgtacttggtggatacatgggaaagtactgtgatgtcagagcaaagtaaactccttattgtttcctgttccttccacttatacaaatagttgcattctctcgcttcacttcttactatttgtgattcttctcaacaaaaaccaactagtcttcgcctagatcacccgagatttgtatcctcctaggtcgtctgcccagcaatttttgtcatgcttgtgatcttgaaatccatttattgaccaaataagctcccatcttcaaccactccgcgttttcttcaatcatcagtttttctttaagttccccaggaataaaattcagtaagatgggcagggttcgaataatctgtttgtattttgggtgcacaattgctatctcatgtagcaaggcttctccgtcgctaaatagatcactgcgatctctgaagtgatttttaaggaggggcaactgtgctttgcaaagcttcccagtcatctttagggcgccgcggcaagtgattggacccagtttcattgccttagacaatgttctgtttttgaatgaggctgataaaatacattggctggctttggagccgtgctgaccaagtgaagactttcgcactctgtttcgcctgcgggaattctcggtgtctttctcactagtgcgatgtagtgtggattcattctctcttttagaatgaacggcccgcttggtctgccactgggggaatgttgttcctaggttattttgttttgacaagcctctggcatccagggaaacctctggaatgccgacactgcttgcctctttgggcagttcaagtgaagtagttagagataattcaattggcgcgacagaagacagaaacacagaatgatcttcattatcttttttccttggtgtaacagaatccattgggttttgctttggggctcgaaacggtatgatgggcttccaggggaaagtttggaggagaactactaaagagagcgaatggatattcggcctttatagcttttggaaaggagatgggatctgcgtcattccaaatattagatgaaacttaaatatgagttgacaagaaagtaataccgattgagggatctgggtaagtcctatgtcgaatgatctccaagattgagaacgataaacgatgcaatagtacctcacttttcgcccggtaatattgtgatgtacgatgggcgtttgccactcttttagcggttgaccagaaaatgaacgttgcgatcaccgctagccctccctgaggtatgccgtgcttaatcgtataaaggtaattctgagggatcaatagttggcagtaattgtcttgtggtttcatcatattgcataatatcgatatatcagggaccgctaatagttcacccagacagagtttgttggtagaactatactctgaagggatctttatacagtggtagtagtagtagtattcatttacactgacccctcgcaaagcgatatgcagtatacgacggctatatatccgggtatgtacatatagattgatccactttctgacatgaacttagagcctcgtcacggcctatcgtggccaattgccgtttccattgttaggctgccctcatggcgcggctatagtggaattgcggatgagacggatacgaagtatccgattttggctgcatctctgttaggaaccgcgagaacgcgggcaaagcagaggctaagaatctggacagtgactgagttacagatgcggttttgttccgagttcgtttgattgagcgttggcttgccttattatcgagctggaacggtgacggtttattgtgaaaacgaagatgaagatcttcaattgtgagtatggggttggcgggaaggaaagggtcttgcactggaggagtcggtcgcggtatggatgtgacaggtcgctggaggacggaagcataggttgtttgttggttttgggacgaggaagtgatggacggtatcgtttgatgaggctggggagagtgggctgttggaggttgttgcggctctgggtctattatggcgggtagcggatgggaacggcagtccagattggtgttcaaccgttccttcgctgtagtagatggaatgggcgtggattgagtttgagactttgtactggagtcatctgtagtttgcgtactggactcggcggtaggagttgaccgtttaggggaggagaatgcggtggttgaggaggggggtttgttgggagttccgaggtggtgtttcaaatcgcacgagattatctgccatatgcagtcttcctcgtgtagttgttgcacttcctcgaacggggtgcattggaaggtggataaatgcttggtcgattggcaggcaaaacaacatgccacattgctgactcctgaaggtcggtaatagaagccattctgggccagttggagcggagtggccccagcaagcactattccttggaacgaacgagctcgggctgtgatggtggagtagtcgtaggtgattgagacgagaaagtaatcctcatcgtgagaatcatcctcgacgtgagaatcgtcctcatcatgagaatcatcctcggcgagagaaaagtcctcaacgttggggtattcgggtgagattgtggggtttgcggcttcgggggtgggagatggctggcttctcgtggtcatccccatggtccggtctctctatctctcgagtatgtccttggaatacagtacttctcgaaactgtatagggtacagtgtatagggtaccgctgcgatacagtacttcccgaaactggtgtcaccacttgcactcttcgattgtttctcaaaccctaactgccaagacagactagtctatattgggagttattccggagtatccttgttagtgggccgtgtattgtttcttacatagagtaatctggatatttagccgctgtattaatctgtaagtcgacctaattggcaccacttcggaagccttcgttccttcggcgagaaaaaggtcctcaacgttggggtattcgggtgagattgcggggtttgcggcttcggggatgggagatgggcgacgggctggggggtctggaagctgagggttcagccccacccgctggcttctcgtcgtcatttccatggtccggtcctaatggtacagtccctaacctctttatacagtggcggccgttaccgccttccatgttagaacagagaattggtcttacaaaccctagtcatgggataccctaaacctaatatgatttagtgtaaacagccgattttgtaccttctaggtggcaatacaaaggtttttgtttgaccacaaagattgtatttgtgaggtctagaggccctgattttgaagctgccaatctgctttggctatagattatatgctttcaacatggcctttaggtcatgcagcaaatgttgagagtggagatattattggctaattgacataacccttaagaaaagttttgtagtgagttgttagactagaatgcccctgctctagatttgttagtcgttttcttatacggtccgccgcatagagctggtttcaacccattggcaagctcttacaggatcaatcgtggaacgacccaccgcaaagccccgtctggacgtataaatagctgctctatgcctatgtcaactttcgtccacagctctatatactggtgcccctgacatgaatactatcatgatgcggttgggatttctctcgtcactttttctgaatgttgtcatcgcccgagctggactctccccagtgcggacggtctgtgaatttgattggagcctctgccaagccagtaataacggcgaaatgacctgtttctgtgatagcgacaaacagaaccagagcactatcgacttgaatgactgctttgttaaccttgatggagatctgagcccacgccaaaagtatgcaaaggcctatccgtatactatatatctggttatatttctgatgatatactaaatccatacagtggtggattcatggattcatgtggtggaataagtttcatgcccgcgcttccaaccttgcgggcaacctgtaaaccaaacaatcaaatcacgtctatcaatatgggtatgtttctctctacttaagctatcatcgttagcgtaaatgtcataaaggaactgaccataagccaaaatccaaacagacggggttttcactttcaagggtaataagttaacttgttccggctaggaatggaataaactagcaatttgttacagggccagacttgaagctatagggtccagctataaggcccatatgtttgatggatgtctgcctttattaaattaacggcggcctatatcgccttctatatcgggaatttagagagtttttcggaccattactacactaaccgctgagacagatataaatagcgcgtggtattttcgtctcgtagcctactcagtaataaataccagaaacttatctaccgattggcatggaatatataagaaccaaagttagacctgggtgatggagtgattacaatggacctgtgtttgtactgtgggattcactcttgaaacggatccataaatacataatcaactatatatggcttaccatatcatgtgattagggtttgaaagagctcctttatattgtttggcatggaaggcggtaacggttggcactgtatagaatgtaacataacgaagaacatataaagcaaggacgagcataactctggtcttctacaaccgcaaagcaaaaatatgattcgcttcatccacgtaacaggtaggcagcatggagttaccgcgaacactgtacctcaccaaggccaacttctagagtagaccatgaagcgagcgggcattttcagagagtgctcagtgtcacgggatttattatcaggatgttcgctaccggtcccatccgccctggtttcgaaaggaacttgtttatatgtgagcaggaagcaaggaactaacctttcaatgaggtgtaatataacgcctacagtaggttggttggttggttgatgctatttaccctgaaccctcgcacacgaaagttgaaaccctgggttgaaatacaagtgcgataattgatctatattgaaagatccagccacttgtagttgcctcatccccctgctgcctagcggagtggctgcctaacaggtagatctatacagatctatatacatcacatgaactgagatccaaatttacatagcgaggagtcaggataaatgaaatccatccatccgtctgtaactaggttttctttgtagataactagggccttagtacaacacgcctaggaaagactttattgcttatcacctgggatgagatacagagtctcgaaagatcggtatttcgagaactacaatcgcaagctgaatcataatttctgtaagtttttatcatattccattgtccagccattgtttgcttgctgttgcccagaacgcaagactaagagaggcgaatacactcccttctatttcactgataactcgccccagtcttgaatcatgaatcggcagaaaatcgtgatatttccaaaatttccgacatgtctgggcatgtggcagcagggttgtctgctttaggttgggtaactgatcctgtgcctctactggacgtactaattcgccgaaagtaaaatcggtgtaaataaaagatgattgcaaatagcaaactagcaccggaaatgctccccaaaattacagccacaccatggcttgacaagacccgggatgcgtcagaaccgtccgtcctcaattgttctactgtatttttcgtggcggtcgtggtcgccggcacggttttggttgaatccatgggctggcttttggtgatcggattgagcgtgctcaagtctaagtcgtcgaatttgggggggtttcgtgttgtttgcgtaggctgatgatgacgagaatttccaaacaaatgtgaagaatatcccagattcccggtcacataactaccgatttccttttgtttcgaccgagacacagcacctaaagttcccggaagtgtaactctattggagaaacccactgaagtttggccagaaaggctttggaagtctcctgttgaagatgaagacttcattgaagtaacttcagccggctggtgcaaagtggcttggtctgagggaacataaacgacaaattcagagcttcctgtaaaatcatggtcggaaccaactgaggacactgtatattgtgataatctcgcgccgccgttggctgctttcgcgaactcatcttcacctaaactgaaaggcagtaacgtgcgagagctctgctcttcaactattagtccgctgccccctagctcatcgtcaaccttgaaatattcgattataccgttttccttttcactggtagtggtgtgagtgccaggatatgtgagggtaggagtgtctatgtctgtctccggtggaagtgatcgaagcggcgaggtccaactttgggttgggctcgaagggtatagcgtaatcgattgcagaaagcttgtagcttttggagccttaacatcagacgttgtgacagtattagacaaagttcgctgtgattggctataaaaagatctcagcaaccatgctctttcaaatctagccaaacagaccatgatagaccaacgcttttggtataaaatcctggggttctgaacccagcattgctttctagcatttcttgggtgatagccttatgctaacgagtttggacattccaggacaaattgtggtagttgaaaagtcagcctttgctaggaagaaacgcagactaaataagcctattgtggtatccgcatttttcgaaccgtatggggtcgatgaatagttctgccgggcttttagtgttacactgccaaagggtacactgccatttgttcggaaactgaatccgtgtctgccattcaataaaactatgtagtttgtgggcgcccgaatcaagaacactattcagtaaggcctaacatagcgggtgacgtgacccctcaaattacaccttgtactaaccaccccgtcatttagccttcgcccttataaatgtattcggtgcaggtggattcatcgaaaatttggggcaggacaaccactgaagcctttacattaatgtcaaataatccacacgagtgaaaatcaactacacttggttctagatgcagccccaatccattagtgctcaaatctctgcctatctggcgcatttgatctagtatatgcaaatctatcttcatattacttgaagtacgctgaaaacttaatgaatcgccattttccgggttttcataaggcccaaagtatataaaaggtggggcactgctttgacatggcttgtcgatatctaagtttattcaagcccttatttctcggcggatggttctcgtgagagttgatgccctcaaagcatgctacaaactatcgctatctaggcgtaggctcaaagcaaagaggaaatcccgctgcttaattgagggtgttactttctgatgggttgtatctcgcttttctgtttgaaaatattagttggactcgtttgggggatatctaccggaatagcagatctcgttgaatattgaggaccacgaactgataaagccctctggtatcgttgtacgtatcccgaaatcactgcagcgggtattttacctcgtcagctacaagtatagccctagaagaaatgtcgattctggaatttggatacgccttttgttctcataccataaagcaaagcgctcatgctgcctttcctgaaaccagtcatttggttcatcttcgtggtcattttttctctggttagtggcttttgttaagctactgggactgatggataacctaattactctagacattcggtcttgtaattcgctctgctgagtataaaagaagtgtcagtgactctgaggatattgcgagccggggcgcttgggctaatagaaatgaagccaccttcgttaggcacttctcatagtcggtcccagagatgggagctctctgatgcaagccgtggtatgtctcatcaggctcgtttactgaatcatcttatcaaagttattagcgcctgccatccaccaatctaatcgataccacactcaacatcgacggcgccacagatcgcattagctttgacgagtgaccatttggtaacctgggcacagagatcattaatagttcggttccacttgtttacctttgagatggcttaggtatataaaaagatgtactaagtgaaggccagtacaagattagtagcaagaaaatgtgtagaaagcatagatgagccaaccacaataacgaagaggacgattctatcgtgggcagtggcgtaggtaggccgtactagggcaaatgaaatcatccatccatgccgtacaaatatcgtgtaaagcattttcgtacgatatagtgggattgctctaggcttcctaggtagtgaactgcgagtctcatgtgataatccctgaaaaggctggaacattccaaacaatcatgatgagccccaagcccaatacatggagaatgaccatagttaatctgcacttacaatatcgctaccggctctacacaatgtatataaacgtattcatggccgcttggctgtccacatcaacgattttctaactaacaaaaaagacacggaccgcaattccaactatctatgcgtacaatgatggctaatgtaatatgcactgttgtatggtatacacggtaccagtggtcacatgattttctgggtaccttaccctgtctcaaccatgtattcctagttttcgacatatcatgcagaacctcgtgaagtatgatccacctctatttaccccaactaatacatacctcatatagcaggactcaggacccttgaccaaactttgtcgagacttgcggcgctacgtcacgcctactcttagaaacccaggcgcacaaaacagctcgtgcaagcatgacgaggtcctcagtgggttggtttctcgcagcgacaagggggtgctataattattttagtaatatccagtaaatacgacgccacacttcctgtctacttcacctttctcaatgattcaatgggttccgtcgaggctgctgataagaatccgaaagcatccgagtcgaccggccactgatttaaatcgttaactccggcaattccgacatccttctcgtgcttttgcataagcgccatagtaattctaggaatagtattggcgtatattgtgtaggtctcagtcggtgagcattctgagcattgatccaagcaggctgtgagaaatgtcagcggcgcactcactcgaacgagccaaggactaaccaatctttactctgccatttgtgccgagcagtattccaccacacgacagtgactgatgcgtgagtccaaagctactgagatagcataggccgtcgagaatcttgtctgttagtttatcgacgaaaatggagacgataagacttacctgtgacattattgcagccagttctaattccgtgggatatatatctggagaagaaaccacattccacaaagtgagcgggagatcctcaacgaaaaaatacacagagtttgcatctatatagcagtctcgagatgagaggatgttggcatgatcgagacaaccaaatcgttgaattagtctttcagcatccgctttgggatactctcgtacagctcgcaattgagatggattggaacgatgggttgctatgataacttcccctgcgatgtcgcataacagggctggtcgatacttattccagggtgactcttgcctcacaatcagcaccgaagatatatccccccctagcctacaaagctgaggaagacgtaaggttctgagaggtccctcgatggactttttcatatgctggtgacgtggcgggcaattcctctttcccaaggatttgtattcgggacgtgtcatatcttctcactaagacaaacaaaaatgaacctgggattacagtagccccggtgggtgctggtggcttttaataaaatttacttttcacagatgccatgcatgcaggtcgccttccgactttactgcatgtctgggaacgttcttgactataaaacttcctttcgggagcccgtcgccagcctggttccagtagcccgaattacaatagtttggaccgctctcaattctaaccgctctcaattccaaccgctctcaattccaaccgctctcaattccaaccgctctcaattctaaccgctctcagtctcagccgctgtcggcttggagtgctctcagtttcttgactgcactaatgatgacctccccaaaatagtctcaaatccccggataccttaccttgtgtttggcacttctactagcaatactataacaggttgaattgagctgcgtgggggattgccacatgtcaaaagcagtaccagtgaaagatgttaacttgttttagtgtaattcaccaactaatccttacgattagttctaaaggctactgtcctaggctgggtctagaaagtctattacagcaactttgtcaataagtgagggtttgaaaatgtacccgaaatacggtctttggctacatgtacactggcgagcagaccacactcaagatgcacgtcctacgcatgctacctgtgttatggtcgtccatatttccaaccttctgccaacttagaaagatgcagcagaaactcttctctacgaaagtgttctcaagctccgttttccattcatgaggcttgcgattacttgtgtacaaaaattgcaaacacccctcagtttcctcacaaattttggtgttggctaccttgttatgtagtgtgacaaagtactccatagttcgttgcaacgacccaaaacagtaatcgctggcagcttcggtattgcttcattggccgactcatgggggccatagtcgggtggagatttgtggaccgcaggctgaggacgttgagcctacatgagttagagacaagacgttcaagtggccaaaaaaagaagcaaattcttactatttcctgtttagttgggacagcgacatcggggtgagaatagtaggtatagaggcggccgttcggcatttccataactacccaacttttgattgaatacaagcgccagaaatcattgtgacggcgtagaagattattgcggcgcttgcgcagctgttcttgttttatgcggcgcttgcgcagctgctcctgttttataggactttcaaccggcgccatttagaaacccgatgttgtcgaactgcagcaacaaggagatagaaagaagcggcccaggcctgttatccaaatctggatttatataggtagaaccattgctccagacacgatggtgttgagtgacatattgctttcagagccctctaaaaatgccctggtcggttaggaatcggtcaagtgtgttcgttcgtccgcgatcgtgcagcactacaagcgtaccaccaataccgaaatgagatggaatttagattcctcaactttttgcttcatctgtcaccaagccctgcggaaaatctgcattccgtcttgttgcaacaccaacagaaatcgcaaacgtaaatctaagtaaaccgcaagtcctatcaaccgctgcgtctcctggagatataagattgtagagataaataagtcgttttcccattcacctcatacgcaaaaagttccacatattcgtcgtcgctacgcttcgaggtttttcataattcgtatccctaatttgccaatcagtatgtatcataccatacatactccccgacgaggggtggcacggactaggaaagaacggctcaatcacggtaaggcccccattacatggcccgccacattagtataccgacagtctttaaagggttactagggggtgtttccacgtttcgagagagcgtccctaagaaggtgcctttccgcgctcagcaccttgtcctagaagcagtgcaaaaaatgttggagcaaagtggattccgctttatccaacgctggctaccccaggcgtgtcggtcggccgagtgggtttgtgcagagtcaatggagctgcacagactcttcccatttttgaaccaaaatagaaaatacgcatcttcgaaagattttcaccagatattggctaagcttcacagcctaaggcatacagtgtccaatatacgccatgcggcagtccacagaatcgttcaagatagcgaatccttgcttgaaatgcttcaggctgctgttgctttcgctagctgcataggcgataaggaatgtacacagcaactcgaattcctttgcagtactttgaataatttactggttcaaatgaatgagcgcttacaccatcttcagcagagggtattagttcagattcggatatgtcactcccgtccagcagagctgatgcaaaggcgtgcccttcttccagaggcagtccgaaggttgacagaacaaagcgaagacatgtttaatttacaggtacaaggcatcttaagaaagaacctattgttgtgttgatatgaggcaagcaaccaaccccctgctttacaagtctcctgagtgagatcttgtttcaagccagcgataggtctgtcatgtcacgtgatgtaacacgtgggcgacgcggcaggtaaagaatgaccctctgcgaacttgcaactgccatccgcaacgcttgtgattcaaaatgtccactgagattgacgaactacgacgccttttagcagaggaaaatgagaagacatccaaaaccaaccttcccgcttcccttgacggtgtccccaaccacttcttccatggtctcgcagttcagcaggataagacacgatctacgcgtggagatcccgccaccgcgaccaacaaaccgcgccccagaagactcaaagcctctggctctttcgcgaaagaacaagaggacatttagcggttgctgatgaattcttcacttctcttcataccctggaagaaactggagagacaccgggggcagcttgttggctcggaactaaaccttaatcgctttcttcgccagaccatggaggaccatgtttcgaaaattatcgaagaactctacagcgatccaagactgcgacagacatttgggttgagaggatcgatacgctttgagaaccactccaatacactgagccccgagtgggaacttgaggagcgaatgcagaatatcgatattcgtggtcggccacgacgacgttcaccgcgtccagctgcccgagaacaaagcgaaccaaggtggccggagaacctaggctccggcgcgaagcagccggcctcgtgccgatcaattctgcgtctacaacaaccccagccaatcatccgaatcgatccatcgcgttgcagccgatatcaaatagtacaaatctccgcataaggtgatactgggccgcatctatgaagggctggaggatatggatattgatgaggtggctgagcaacaagatgatgagttcccgaaacttctgttccgtcgcgcgattgctggactccttgtgcagccacatgactacatcattcgtgctggtacggaaattgaggtgctaagtaccggggaagctgttatttatctgcgaattggagaatcctgggacgcttctgtaccacctttctggttccaaaggaagacgttggggacttcaccggctggaaccccccaatcaaatggcccgaatcgtctacattttaccgccgtaggggaatccctcgctttcactctccaggcgctcaagttgcggcctcggcatcaagcttggagacacaaagcaatcgactcattgccaagacgggaagtggtagtcgcaggtattttgggcagaatcccagacgaggaggtaccgtcttccgaatatcggccaccaagacgaatgggttacttcgaatatctctgatacaacggcgtcccaggcgaaacaaacccggtgttggtggttgccagccagtagacgcacaacgggatgcagacgaggaccaatctgaccctgatacgccgaaacgggacccacatatatggcgcattatcagacagggacagccaacgtcaatccatatggcaccaccactagctttcagggagagggggtatcaccggtattactgcacgttgaagtgtccacgcggaacattgagccggggagagctagatcgggcttgccccaaactccttgaccatggaaagggcaccatgttataatgcaaccacttgcctcaaacggttgcggcgtcagttgtttcagacagttaatgcagattgtgaagtactgggcattcacggttctcggggtgctcttttgaaagttacgctatctcgcacggatataatgtacctgcaaaatgcaccgtaccagagtttgcggaacagtttcggcatgaagctgctgtataggacaaacctctttaccttggaagcatcgaattggctcatccgtacagctacgacggtgccgcatatcttgaacatatgatgttattgagtccgggaggacagcctgtcgacctggcactgaaggaaatgagtcgagattgcttcaatgccaagatgaaggaatcgctctcagaaatgcaccttctgcatgttcttcatagagatccagccccgcgaaattggctgtacaatccagaaagcaaaaaggtagtatttatgattttgaaagggccgagatgatcctggggataacgtcgccaaatcggaagcggatgccacgtgatgggattgtttttaaacagagcagtgcaggcattgtgaggtcggaaggttcaaacgaggatccagtaaacgtagtcacgattccagcgatcacgctaagtaacgtagattatgctcggaatcttcgtgtcaagaattcgagatgatcctggggataacgtcgccaaatcggaagcggatgccacgtgatgggattgtttttaaacagagcagtgcaggcattgtgaggtcggaaggttcaaacgaggatccagtaaacgtagtcacgattccagcgatcacgctaagtaacgtagattatgctcggaatcttcgtatcaataatttcgtatatttacgcttcgtagccgtcggaaattcttttttttttccttggattgaaaacactatcatctaatggcgaattacattctatgcctaattacagccgtacacggatcagatccagcgtgtggtatgattaattcgtgagactttccactgtcgtttccaaatctgctcagcctgggcttctcgaattctggattgctcaagagcaacacgaagtttgcggactgcttgaaacacccgttcattgtcaagcggtcttgcctctggctcgaagtgatactgcaacgtcaactcttgggaaacatcaataatcgacattgtcaaattgagaagattttcaaaacaagaccgataaaactgattctcgttctcctgttgatcccgttgacaaattctttcttccttcaactcttgaagtgacaggcggtttcgtgactttgagcacttcagacgcgttcgggtggtttccaatgccatggtagaacctcgggccagtgcaatctgatgatccagagaatttatttctggtaggtcgtgccgaggaggaagcatcattggcatggaactcaaaatgtctttcggagattccggtgagcgactgtaaatacttgaggcatcatctgcagacggatgctgctcaaccgctttcaatggcattttggacagtatgaatggcggcatacgtttacttcatacctcgactatcttatatgtgtgcgaagaaccaatccctgagtaggcgcttacaatgtaaaggctgaagaccaatccagtgtcattttcttgcgggtcactcactcattttgataaagactccattttcacgttgctttcgctttgcggtatggcggaatattgatattcggaagcatccttatttcggcggccatagtcgaggaagataatacggaaataagatacaagatcaacaacaaatatacagtagaagcacagatcaaagaaaacgcgatgtccagctaaagcgttctatacggccttcaattgaattggataccatcacggggcagcatggggcggacaacatcagtatccgtttctgtaaacttaggtgaggggcaaatgaaaatcatccatccatcctttcaagagaaattggttagttgaatgtggttgactgagggagtgattggtttaaatgtggttgattgaagagtggttgattgaagagtggttgattgaagagtggttgattgaagaatggttggttaaagagtggttggttaaagagtggttgattgaagagtggttgattgagtagtggttgattgaagaatggttggttaaagagtggttatgtgaaagagtggttacgtgaaagagagcttagtgtcatcttcgttgaatcagctagactaacactgtatacttgaccctgcaaaggcgcaatactgccttgtaaagtgatatacggtggtcctctacactatcctgactcctaactctgtcttcataacatatatttcaatcaaacatttcaattatgcgccttgaaaccccttccgtccttggactaaccgcatctgctctgtggtcagttacttactacaccacaactgactgttcaggcgcggggaaagaggttggttggaggttacgaggctgggtgctcgactctggggaacagcatggaatcggtcatggtctctaccgatggtgtcaacaacgttaccttgagcacgggtagcaactgcaaccctctaatcccaagcggtgtaaccgacctctgtgtcaatgccgctatccgttccttcttatctttttgatcgtaagtcatttttttgtgccatccccaccgcaaatatatctgcaaattaacattgcaaggtttattaaagccctggaaatgcgcggggtgggtgttgatagaggctcagccaagaggtcaagatgggcttctagaaactgcgtgtcattttctctatatatagatctcagttacatgtatccagacgcctttgcaattttttccattcgagaccattgtagcaatctccaccggagaatccaaggaaagttgcgctcgcagttagtttcagcatattgtccttttcttgttacgcttcagtgtcatgcctgtttttatttaggggttggtggtcatattgtgggccacaacgatctgtcagtaagactatttgccatctacaaatagtaggtatatccctttcctcatcgacaataccttcttctcaaagcttgttgggccaggccatcccatcagatacatccttgccactctttcaccatgcacttcatcctttttttaatattgagcctggcgtggctggctaatgctacctatattccctccttggtcaaggtcaatgcggctgacattgctactcgtggcgttaacggatatcgttccgtcgcatactttgtgaactgggtatgaccttcaaccacatattccaccataaaatcaaataactcaacaaagtctgtcagggcatcttccaacctcaggacatcccagctgagaaactaacccatgttctctacgcatttgccaatgtccgagcctctggtgaggtgatcctgtcggacccttggtcggacactgataagcactaccctactgattcctggaccgataccggcaacaatgtctatggctgtatcaaaaagcttttcctactcaaaaagaaaaatcgcaaacttaaggttcttctgtcgattggaggctggacgtactcttccaacctcaggctggcctttgaaactgaagcgggacgccagaagtttgctggcagttctgtcgagttgctaaaggacttgggcttcgacggtattgatgttgattttgaagtgagttttccatctcgttcacggtttttgatgctaatgtcagaagtatcctggaaataacaacgaagcggaccaatttgttgataccctacgccgtcttcgtgaggtattttcatgcttcttttatttatgggtctgtaaaactaaacatattcaggccttggatgtatacagctacgccaacacaggcggctatcacttcttactcaccgctgcatctcctgctggtccgtatcattcgttcaaactcctcaacaacgctaacctaatttataggccctgccaactacctgaaagagcaccttgcccagatggatcggtatctggacttctggaacctgatggcctacgattacgccggaagctgggacactgttgccggccatggcgccaacctgtttgcatccaacagcaacccagccagcactcccttcaatacggaccaagcaatcgattactacacctcgcacggagtggcctcttccaatattgttctaggtatgccgctgtacggccgggcgtttactggcaccagcggccctggccaaccttataacggtcttggtgttggtggctggagggatggtgtgtgggactacaaagctctgcctcagaccggctgcaaggtcacaaatttggaccaggaagctgctagctactgctatagctcggggtcgcgtttgttcatcagctatgatacccctgaggttgcgcgtaaaaaaggtgagtacatcaaatccaaggggcttggtggtggtatgtggtgggagcttagtggtgacaagcaaggtgatgagagtctgattaccacggtatgtttcttagtccactcgcatttcattatcttacttactttaaacttgcaggttgtgagtactcttggaggcactggtgctctggacaagagcgataatcagttgagctatcctaattccaaatacgacaatttgaaggcctgctttgagccttgatcaacttgcttgctcaataaagaattaaaggctggcagctggtgcattgcatccaaagttgacacaataaattcgccctcgcgctcatctacctgcactccatctaccaccagaattaagttctaactagtgcgagataaaataaaactattgcctttcataacagaaacagaaactcactttctcaaacaccttttaatatctgcttcagattttgtattgttggtacgtcgacacatttcagcttgaaggtttatcctgcgccaaaatttccacaagcagaggggattacaatgaacaatacaaggaagcctgcacactggccaagggaatcactatttgtgctgggaagaataagttgagatatcttgatagaattttgaaatggacggcaaaggagttggtcaagcacagaagtagtagtagattatttcattaccctgtcccctcccaagttgatttaaccactagaccaaaatacgaatccgtacccagcctagtgggttgtggtttagaatccaactgtcgaaacgatatgcagcctaccgctactatatatatcttcctatgtacatgtatcgtgtaccacttcctaagcgaacttggagcctcgccgaggcctgccgtggcctctatgccgtcgttgtgtttatgctgcccttatggcgcgcggctttgaaaccgttgcgatgcttcagcaaaatccaagacagcctccactatcttggttcgtgatgcactgtcaatcttacctcttccttcttctcctggacactgtacagtaagagtcgaaatcagattcccctttaggcacacaccccttgtttctcggctcgtatccgaaaccacgctaaagaaatgatttcaacctgctcgtaagaatcacctccattccgagccctcggaggggaccggagaactttcaccagtactaaaggacctctgaacgtcagcctaccaaacggccaaaagcatgttaaagtcattggtgcctaaggcatgaatccactcgagccaagggggtgagtaagctggtttacttgagggagataagagaataagtgccaatttacagtgtgtgtgtatgtgtgtgtaattcatttacgctgacccctcgtcgaaacgatatgcagcctaccgctactatatatatcttcctatgtacatgtatcgtgtaccacttcctaagcgaacttggagcctcgccgaggcctgccgtggcctctatgccgtcgttgtgtttatgctgccctccatatacagtattggttttttatgttatccttcaatacaaaacgagatgtaagaaatgctcattcacctcctgcatgatgcacacgtgtagcttcaactatataaggcaagatatgatgtgaaaactttccggcatactgtactaaacctgataagctctaattaactagcctgcggctcgcactggcagagtagttctatctacatcagacggctgcagattcgcaagagcatttgcatgccggggtaggcgtgagagttggagagtgatctgcaagggatatcccagtagccgatttgccggctgaaattaaatccaaagatggactgtctgtaggcgtcgacgtgaatatcggggttggagattgatcagcacggagcgtctcagtagccgatttaccgtctgaaataaaagatggactgtccgtaggcgtcgacgtggatgtcggtgttggagattgatctacacgggctgttccagaagtggacgtgccgattgcagttgagaacgaggactgactgcctgtagatatcggcgtggtcgtctgagaggaacctgtattaccaatgctacacccactgggcaccttaagaccgttttctagcatacaactagacgtgtctccctgtcggttgaggaaagacacagtgccgtttttgttgactgtcacccaggcaacctgctctccattttcagtgccacatatatcaactttcaccgacttatcgtcggaaccggcaccaatgaaacctaaagagtgttaacaatagcgtgagggcctttgattcgaattggatactcacccgagcaatctttgcctttcagcttagcaaaggttgctgagtagcctgtacagccgtggttattctgagaccacactctacagttgttctcgccgtcattgtcctcaataatagccaaataactgcctgccacaacattcccgataagtaaaaggcagttgaaggaacgcatcctggactatgcgcggcttcaaggcaatcaagtgcgatgatggtgacgactggctgggaccgaggattatttatgctcgagactgaattgtgcgctgggagcgggaacgaagctacagtagataatggagagaaaagtactggcctcagaaaagaggtgataagactgtctagcatgccacagattggacagcaaagcgggggtaggtcgtccaagtcgtggttgtcaaagaacatacgttaaggcgatcccaagaagcaattcgactactgtagttgggcccgcaatttctgtttgcccctagcatgtttccttaccactcatcaattatttgccctgcaaagtatgtatctaatgtttaatgctcactttatttcgatggtgcaaagaaccgtctgtaaatttagtgtcttcaggtatttacattaaaccggaaatgtgacggttctttacagtgcgtctcgaaaccggtgcaacaaaaagcgctcttcgacaatcttttcggccccactgccaagaccttagcgcagatcatttattgaggttaccaccacaccgagtttaaatttgctgcggtagccgatcagcagtacagtaactatcaattttacccgatatccaaattatatgaaatatttcaacgagggggaatacaatgctatacaatattcattatagagatcctcaatttagtccggtcaccttaataaatgatctgcgctaaggtcttggcagtggggccgaaaagattgtcgaagagcgttcttgttgcaccggtttcgagacgcactgaacaacaagaatgaggtgcgtttctctttttgcattgtgattatcaaatacactgccaggtggtgcactggcgcccacgtgaagtccagtatagacaaaagagcttttagaacaggtacagtacaagacaacaagtccgctttaaaatcacacttgttcaacagttgagacagcgcaggtcaggacgcatactgtaacccgctacactggcagctccttgtataagttaattctttttgattcaagcaagttgaatggagaagacagagattcggcatatttattgaaaggcactaatcgccattgaggtacgctcttcgaagtccatttctcgatactgagcaggttagcaagataagaaaaggatatttgatcataagtctgcatagacgttggtcgaatcccaacttgttctcgacgctggatagcttctgtaatggctcttattaattgaactattctcatatcgcattactgtgcggtcaacatgccgagggcagataaatcctagagcggttaaagttgggtgcggtcaaacccaacggtctagattatcttaattcaaagaccacaactacgtaccggtagacccttgagagtcgaggctggttaagcttgggtgtcatcaggtttaatcacgtttcatgtcgtgaatgctgaagagtgctcctaatcagtggcatcttagaccaggtaagcagtatttttcattctatatcgtaaccacttcaacagatggccacgcgctaccccagttacatgtaggttgacgaacgaccagaaaaagccctcacataacccattcgacatctattccctaatagccccacccctaccaacttcaattcaacgtttacaagctcgcttgctggcataggcaacatgtcgaggaattccttcgctattacaacgagtctgttggtctaaggaggatcgcagatcagcttagtctgcaatatatataagggaagacttcttgtgctctaccttgcctttcaccatacatatgtacttgatttcctctgccacttcttggctttccatttccgccttagtgctcagtccttgccgctttttgctcactgagtagaactgagcacgcccctaagtattacataatcacaacgctcgctcactgagcatcacctgatcgttacataagctggatgactgactcatgactcactgagcgtcacctgagcgctctgatttgctcactgagcagcctgatcttacttacaagcttgacctgagcgctctgactaactagctcactgagcacgatctgattattacataagctcaaggacttcacgtattcggtaagcgagctgcgcgcgcaagccagctgcgcagcccaaaacacatagtaaaagtgatgcacttgtcatttatatttcaacaaccaacgtttttatcatattaaatttcttgccgatagcaaccgataagcatttttagtgttatatagcagtttcgcctagatcaaaaacatgcattgtcatggtttcaaaaaatacatcgctacttccaagaaatatatatttatcgatcatatctctatcaaacacctattagattcctataaagtctagataatagctagatgtcatataataggctataaggaaaagttcatatacataaccgttgttgcaatatcatattgtaatttatcgcttttaccatgtgttttgggctgcgcagctggcttgcgcgcgcagctcgcttactgaatacgttagttaacgtatttcactaccgagtggccacaaccaccgagcgaccatctctaaaacacatagtaaatacaatattttataaccttatatttcaacaaccgcgttattatatgatttaactctcgttagatagctattgataaggattcttaacgctatatatgaatttcaagaacactggaatgctataatatcatggtattaaaaattacgttactcaaagccagaaatatatataacgcaatcacaaagtcataaatattttctaaactccctagagaagctatatgtcacctaaaaagcattaggctattaggaaatctcgatatagactaccgttgttgaaatatcatgttgtaatcaatcgtgtttactatatgttttggagatggccgctcggtggtagtggccactcggtagtgaaatacgttactcactggagcaaagcgggcgcggggagcagctaagtcaacagctcacctcaataaaatgcaccacgctagccccatccaaatgcagttttattcaccagactcttgaccattgtcccctcaacgaaaggctggcctcatcaatttggcggtcgatcctggttatttcgcctccagctgagaggccatttgatagtagggctacatttattggttttactattttgcggctatactactattcaactcgccgagtctcgcattctacaatactatctctacatagttgcggaagatatccagccctcaaattttggttctacaatctcagaagaccccaattaagtggttcgtaaattcagtgtagtgttttattctcaaaattttgtcattatttttctttcccgcttgaataacaccggcttatcgctcttactgcctacccacttgctcctaggaataccacttcagctaaaaatattctagaccaatcgatcatgtctactgaatggtctagccgcccatgacgaaatttgcggcccctcattcgcccaacatattcaaactagcaatcagaaaatatattatcctagctgacttcctaggagctccagatctttcgctgtaaatgataccaatcctaggagcttaagtgctattcgcgagaaatatgactactaatgctaagtgtcaaagcatataaataggaccccgatccctccttaaaggaaaatatcaggtttcaagcatttctcttcaaggtcccgtaaagacttatcataagttcaagcaaccaccagcattctagtccatcttttattaggcccttagccaaggcaaaagcctaactattatacagattttctaataccgcagagaaaagcgataacctggtcgacatctaacatttcccattcgataagagttataagacagtttcctacaaattccagagctctaagtttattatatatggtcaagacctaagtaggaagatataagtgactctcattataccagggggagcgcgagagtttacaaggggcttatggctgactaaattcagtagtataaaatccactaaaacctaagagaaaacagatccaagctttatttaccagtctaattacacgtactaaaacccactttaattgcacatactcttttatcattaagctagacgtaaggagtaaatcgggtatggtatgcttccaccgattaagctagactaacctcccacgtaagcgagcttaattagtgatacccattcttctctatgaattgccaggtaccgctatagactagactgcggcacgatccacaatatccgcggatattttttgatatccaagatccgcagccttgcggatttggatatggacctcatgtccattggatatttgcggatatccaatggatatcaaacaatacaaacatgcctagactcgtgacctcgaggggtgtgcattaattttatgttttcctctgtatttttcgtgtaatagtatgttatgtcaaataatcaaaatctggatcttttgggggttgtatgaatttaaatcttcttattcattcatatatactatttatagatctaactgtgaagggctacggtcgaattgagtcaattaaacggcgcctgtatgctgtttagctaaagtttaggagttttactatgtaggaactccacgatagtgttatacattcttaaagttgtagggtggtgagcgccggtagttcctgggccccagcgcctattctctgacctcggtcagaaatcctcttatagcaggggtctctccctcttttatgaccgtgttcagaaacttgggctggggggagactggcagcgtgcacgggtaaagcccgagctctaatactggcactatcccattatactaactggaagccatctggtagccttggctgttttcgaatccgccctgaacggcctggtatgctcctatccaccggtatctctggaagctcatcatcctcttcaacagcgtcgtatggtcgtttttgaggttgttttccttttacccgtctacgtcgctcggcactatcatcatccgagtcattatcaccgctctcagtgtgctgggtagcctcgagtccagtctcttgatcctcctcctcgttatcactgataggctccaagacctcaagctgtggtaatgatctccgggtttgatctagcaaagcagcttcaccttgggatagatactctttgataatccctagctcctcatgtcgaagatcaaagttggtagcaaactgatgcagcatcaggccacggattgtactcggcttcaattgaccacgacggtaatgacagatatcacgagcacaattgaatagtcgttcaacaccagcaccactagcagggatagatagaatgtcccttgccatccttgccagggtcgggaagctctgctcatgttccttccagaaaagtcgaggtttctgtcgctcagttccacgagcaagatatcgtgcaatctcgttgtcatctggttttgcaagctcttccaatggctggttttgcgatgcacaagcagcatcaagatcacagtcatcattctcatcaatggctactccagaagtctccagtgccgctaggtcattggcattataggtaagcatcttcctatatcgatcaaactctcggtttaggacctcttgataacgattcacataatcaatatcgccctgccaatcagtcgaggaaaagtaccggaccttctttgatggagagaagattgttgctagagcgtagatgtcaccataaggctcgtattcggtggcagtgtagtacttggagagctttttctttgctgtttggagtgcccgcaacatccgtttcttccagatcacacctttattcttaagcttcgcctcggctgcatcgagatgggagaaaagcttgttgtagatactgtagatattgtgtgcggtaatatccttggtctttgacagcatcattgtgaaatcaaagaagggctttgtcagaagaagaagatattcgacttgacgccactcttcttgatcgagcttgaaataaagatattgatgatcagtacaatactgatcatagaatggctggagcttcttggcccggttgagcatcagaaatgttgagttccatcgtgtccgaacatcttggattggaatcaatgcaggctccggctgcagggccataaatgcctcccgacgttgtgggcttgcattaatgaagactgctagtcctcggatcttccatacttttattagtctagccattataaggatctaggggtagaagatatacctttttcaatgtatctgtgatctggataccgccggagatattgcgcttattctagaaggagtgggttttttcgtcagaccactctaactcgatctccttattacttggcactgccttaagcttcccaagaagctcattgagactcagttggatcacatgcgcgatgcatgggacgcggaagatcgagatatctgatgaatgctgagactgaaggttctcctggatactctgcatcaaagtattgttgttggttgcgttgtcagtggtcactgacaggatacgatccgagataccatgttctgttaggatctgggtcacggttttactgagattttcaccagtgtgggagccatggagaggctcaaagcctagaagaacctcacagtaatcccagttatgatcgataaagtaaccagtgatagccataaaggcctgctggaaaggagaagtccagcaatccaaggctatcgatagccggcacccctctggaagtctctgtagaatccccttctggttattctggactgtgatatcgagatgacgtcgaatggttcgtgctgatggaatcgtaagtttagtggatgattgctgagcaacctctaacatgcggtggaattgggggtgttcgatcactcgaaagggcagatgtgcagttgaaatgaatctcagaatagcatcggagagacggtcttgggtgaatgatatactagtggtacctggctagattgtagtacttaatgttagctgctaaattataaagaacttgcctactgtagtaacaccagttaagtaacccggttaacatatcattcttttgataagctggtcgattctcgggccacttttctttgaacatgctccagttttgaggtgcgctgtcataggcgaagaaccagcacgccggaatcttggatggccaattgtacagaggcatgccttacacataaccttcggctttccatttttgtcattcgcaacctggtagaagctgtcccagatatccgatttgctttttgattcccatcgaattgtgttctttacatcagactgagatccatactcagttgtaagccaccaactaacgaatttattccgtaagtcctccatatcatcacacatagaatcagatggatataaaacccagtgcttttgaaggggtccgacgcgagtaagggataagggcgcaaaggttgaacgagttgaacgagtcggcgatatcgatgggaccggtgtttggatacccaaaaaatcagagaagttgtcaggataaatccgatcagaagctaaatctatatccgaattggtgaatgagaactgtgattgagacattgagaagttaacaattataacatgtaatatagtagggtgcttaaaagaatagagaggcttacatctgaactagtagaggttttcaggggtaaagtaaacatactaggatattctgacttagacttgcttttgatgtggtttacctagatgattggctgtgttgtatattagtgcggataattggaggatatcctgcggatcttgaggatatcttgaggatattgcggatatcttgcggatattttgtggatatgttgtggatatgttgtggatattttgtggatatccacaagatatccgcaagacctcgaaactcgttaagtccgcatttcgagaacttctatctcggatttctcaagttctagtagtcggaacaaattaaaaaaataatcagtagatagatgggacttttagcttttatttgagcctaaaactaaaagaatttatctaataataacagttttgattttccatgttctgtttcctacgaagtttattatggttgacagtaggtaaatatatatttctacgtgtaacttaccacaaaatcgtcaatctacggccacctttacaatataacgtcggactaagaaaactataagaccacctacaaatactgtataaggagaccttcgatacatgtctatttcctaaaatttcaaagtgccgaccgtcgatttaaggggttggttctgtcaggactaaacatgcgtttatttcagtggtaaggaaatattggtaagctgcattaagatcatgtgataggctataagggggaaagtaagcgagagttatgctagtgcggatatggatatgaactcatatccgcagtgcggatgtggatatcaactcatatccaatatccgcaaattgcggatataaggatcgatctgatatccattggagcggatatgccgcagtctactatagactaacagctataagggatctaagcctttcacaaacttagtcaaaactaatacttatctagatgagacttatacggcacaatactactacattagaaacccagaataccctaggtagagtttagtattactacaaaaacacataaaagataagccttcgccccctcctatcactaataagcacgattccttgtgactattaccggccatgccataaaaatcaagagcctcgtttaccagtctttagtctatatcattccactccttttaccccctagctttaccttgtctaactgggcttctgctgtcgtacaggttgccacttcccaacccctcagccagagtaaaagcataacatggttctttatacaaattatctgatatcgcaaagaaaatcaatagcctaggtgatgtcgagagcatttcgacaatcgcttagtcagggctgttctggcttcatatttggtacaattgctcattaattaccgtcataagtcaattaccaaatttctgtccaacctacacagccaccactttaacacagatcagccacagtgcgtgaagcaactataatttataaggtacccgaaataggtatggctatgtataatactataatcactcattatcgttgcggcttataccacttttggcctactatcacatcgaatatatataaatcatagggagctatctaacaaatattaatttatgaaattttcctagtaaaccttgcttctaaaggcttttcagaggaagatatcgtatttaaggctcgtgttagtgttcaagctcatatagtagcttaggtgttttatcactaaccacaaatattgtgtctttctggcctttaacgcctctgcgaagcctaagacagcgctcgttatcctgacccgcgagatggtgtctggtttacctttcctaccttcacttgagcctcctagcagactcgatatgctattaaacgagtcccgagcttcactcctgaacttccgtcagatttgcctcaggtttggacagtccaccaacatacatatgggtaattgtttcttgtgtgctgcactcgcaatgatcgttcgtcgaggaatcaataggcgttagcgtacgtagataaccagttgtgtcctgtgggtagctgagttaatatatacgcacgattcctaggcagactgccgtacaatcttctggtgtagatggccggaaatgccttcagatcactccgtattctcgaaacccaatgcgttaggttttaggtcgagacctccgacctaaaacttattttgccgaagtctaacacggtatatctttaccgcagctgcggcggcggtgtgcagtttccacctactgatattattgtcgttccagcagagcaacttagactccaactaaagaagaaaggaaacccagtgaaaaataaagaagctgaaatcacggacgctatggcgaaaagaatttttccaagcccacgagatctggagcaaaacgcccacaagcggcggaaagtgttaggattgcggaaacttggaacatgacttccatgataattcaatttttcactttgttcatcgcagactcttagagtgtatttgaaggccacattagctaaggcgaggccctataatacacagagtactccgtgtacgataatcccttaagaattcgactaaacccatataatctcgactccctgcggcgccgggatggctcttgtccaagtcgtgaattgtccgttagattccttgccacgggattctaggtttttaccaatttcattattgaatatttttcatttctttgaactttttgaaaccactctaactctttttctgaccctaccattcacaatacatgacagagtacacttccatgtagccctgttcgcatgttccctggtcgccattgccagaataacaagtagcatcccgatatccatcacacacaaacttgccaaccttcactccgggtttgcctataggaagatttgttccttcatatttgcatgatttgccataagctttgaaaccgctgtctccattgtgaatcccgttaaaagagccgtccttctttacaaagtcaggagggaaagtttcagggcaacctttgctaccagtggaaccctcatagatctcccattgagcctcactctctacgttagtatggtagtagaagagctcgatatgcccagcactgccgccactcgtcggggcaggcccagttgcagtggttgtcagcccctccagaacggacagagatccaaacatggaagagaggaccgattcttgggaaatagcgctgctcagaacctcggcggggtcttcagttgtcgtaggccagctttccatggtgatcccatagccgggcgcaggtgttccgatgatcttggtcgacgatggggtgaccgagcacccggtcgtagtagagcaatcgatgtcacagtcggaacctttaatgcaaactgtagagcacacttgcgctgtttcagtgctgcactcatcctcatcgtcgccgtcagagccaatcccgctaccagtaccgccactgctgccgccgccgccagatatactgtcgaaactaggcgggcagcccaaacagccgcaccatggggcacagccgtgaccgctgcctttgctgtctttgctgacggtgggtgtgggactacccgaggaccaagtaattgtggttgttcccctgttgatttgagtgtccttggctgtctgggtccaggggtatggaggtggagtgagcgtagtggtggtgctggttggagtgggacctgatccgaatggagggagtacatataccatcaggggcaatgtaatgctgcttgtcatctccacagacgaaggggcagtttggctcgcattgatcgatactccccacaccggaatttcggtcatggtagctaaaacgttagtccgaagctctataacaatcaggttgaagatggatggcttacatgctgggaaagataccgtggcatacaccgttgttttcttgtatccccgataagtggttgtaatgccttcggcatcagttgacgttctggtggtcaagtagctctgggtaattggggtggtccattctggaaccttgagggtcgatggagattcaagaggcagcggaggtaaaatgatggagcatgggggttggcattcaacgaccggtgaagggtcatcccagatggaaggggcaatatacacatctccagatccagatccggagttggagcccgatttactggagtcttgttccacacaggctccttcaggacagtatccacgttgacaagtgtattcacacatgggcccatatattgtaacatcattccctggggcagctgtgccggttttatcggttgtaggagccatgacattcaccgcaccctgcccagtgcaagtgcacgcgttcattggacagaagccatgtgtgcagctgaagtcgcagagaccagcaaggttaccctcgccagttcccgatgtgcaggctggaggaaggaagggcgacacagtaggtacagtcaacggaacctcttcggtgccacagctggagggtgggcaatagccaagattgcagtcgaagttgcaaagtccactatagctggccccctcgcctgcgatgggatatccgaccactccggtcgagttgggcttcttgtatcccaagcccatcttcgtgcaggtacaggcgccaagcggacaataattgtatttgcaggagaactcgcaaagaccagcgaagttgtgtgcgccagtgccgttcttgcaactctgatcggacagttcttgcttgggcgaggttgacaccttgttgccggttgcactacccacccaggcattccagttctgaatcccattgggacagcctgacgagattgactcaccttggatagtggtgataacaacgttgttgcgcatcagtgacactgtcacaggtccagtacgaccgtcaatatgctggctgccgtggtaggcaccgatatcatcgtctggaactactgaccatgcagcagttcgagcgtccccaccgatggagacgaccactccggaaaatgaaccaagcacagcggagaagaagatacgatcctgggccatttcagcaggcggaaattcaatctgcagctgctgcgcagtgtttccactggtgcctccactggcacaggccgccccagggctcaatcgataccaagagacaatgctctcttcggagatatgggcggtgccctccttgtacatatcgatccagaaggggaggtgtttgcgccagccatcgtggggcatatcggtcacgtagttgaatggtgcctttccaatttcgaatgcctccatggacttgccataaagagggccaatgtagtgagactcgccgtagtcattccatgagataatctgcacaaactcaggctgtacaaagagtacttcctgccagcggtcatgccagaggtggtctcctctccacatccagttcttcttatacccaggcaagttggtatagaaccacggagaaacaggcatcatataaggcattccacccaggtattggatgtaggaagcgtcaatataagtgtccatatcttggggaccccatggccatcctgcccagctgaacagaccatcgacgactccagtttcaacggagggtttggcgcccagagaagaccagctcgggataaagaagcagttggtagcagacttgatcgaaggccaatcatcggcacggccaggaccttcaaaggtagacacaaacgcttgacctttgtaaaagaagtatgaggcatgtgcgctatactgattgatcaggttggtgacgtcactcttcggccaattgccgtttccagcataatcgaaggaaaagaagagtttgaagccgacactgtccgctgctgaaaatgcggctgggagggccttgatgtttgttggatcattgtaggccatgttgagtgcaaaggcgtcaatgtgcgcatcctgcgccagtttcatatcgttctcccagtcatcagatgtatagttggccgagttggttacctagtctcctgttaacaaaaagtcaagtttttatttcactgggtagatatcctgcttaccatgaagtgagcaaagacagacgctgcctgcgcctgacaggccagcgtaagcaccgtgatccatatcaggaataaggacatgctggtcattgcaaacttgaaccctgagaaaggaagcgaggtatcccaacggcctgggataactgtccctttttgataactacgctttatatcgtccaaccattttgggcccttgactccgagcagaattgagacatttctttctcgccatctccactaaactagtcgaattgcgtcgggtaagtcggagattgcatggtcgcgacctaatttactagtagtcgagaggcgtcgcttcatgaaattgcctcgcgtgtactagtaatataccgccgtcaaaaatctatgagctacgctagtgctaaaagatcgacccgctaagtggatcatggtcaatgtaacaatatctgcttagcgtgtgcggcgagggaactaattgcttggcgtgtaaggcgataccaaacgaagtataccactagcatctttgcagcgtagcttagccaccaaaagagatgccaagaatgcaaccttggaagaatgcttagaaaggcttcgaggtaaaattgacttggaccattaaaatgtttgaccgcgagaaggctccaacggcctcaagttatgccatctcttcaaagatcatcaaaaagggaactagagagaaaagtagaaagacaagtatcaagccaatcataaagccagtcagcgaaggttgttgtagttcggaggtatgaattgacttatttttttcagagcgctagttatatgagcctgtatttacaacgatgagccaagttaatttcctatcaacttcgtcttgagtatagacacttcggagcaattccgacagtgcgacttttcctgacctgcaccagccccatactacaaccgaacaaaggtctcctagcgttggagccggactctttgcgtggccttcaacttcagccctcggagagggtatactgattcgtagagtcgcagcaaattttccaataggctacagattaatagctcacaatttctcagctattatttgtagggactactcgttccacacccatattccttgctaccacacccctctaacccgaataagctcagcgtttgagtatcttacatgaccgctttcttccgaaattatccaatacacacagtacttctaatcgttgaacacatagtactctgtagtcaactatatggctcctgtataaaacgataccagtaataacagcgaggtgtagtagtatatacatatcccaaattagtcctaaatataaaacagatactgaaaaattattctgcttccaggtatctaaatggtgtatcttacgtaattttatatagcagaatggtcagatcctgtggtaaattttctgccaatagtatgcacgtaagaaaatacagtgccatgtaattgaggtgtctaccccctaatcgggttagaggggtgtggtagcaatgatttgggatgtggaacaagtagacccctatttgtagtgactcaaataaaccaatttgataccctaagtacacaaaaacctgctcctcggtcagtttgagatcacaagcttgtactgccgttgccccacatacgcaacttgcatatggtctcccagttgagaaacatatcctcacaatataggtacttcaatgatggtggccatttccgtgctggcggccatgtctgtgatgacccactccgcgcttggcccggggctaaagaaacaaaccaattgttagcgtgaactttcgagccgagaacaaccgaaagaccaaaagcgtaccggatagctagtctccattgccacgccagtgctagtcacagcgatgctggacgatgggccgggagtagcaactggcagagtcgtattgatggggtcacacccgccgaaagtgaagccagcattatccgagatggtcaaagctgcagtacgatgaagatcacaccgaccggaaagctccatgtagatccatgattggcatttctcgaccctaccgcaccagtcttgacattcagcggtcgtattcatatcaaaggcgaaagtgataggggcgctgttgtaacaagcgattgtgtcatttcggattgaggtccagcattcagatgagacctcagtggccacagccagggtagccaaaacgacgaaagagtagatagggaccatactgccaacgataggttcagaataagagtagcgaatagatattcggtcagttacagacggaattgagaatatatggcagactttgtatttttgcctctttgcgagccctgttatctcttcggcgtgttgccaagttcaaactagcctactacacagtccactggtcctagtctgggttttctcggctggcaggagactttccaggatgagttcttcggccaattattcaccatctccgtgtggattgggtagcttttggttgcatcgacacaaaacttcagatattgaatttccgaagaaatgaaatcctcctgtgccgaacagccggaatgtggataatcgaaagttttggttaggtttatcgcgtaacgaaacacttagattgccttaaatccacactctcaggatgctagaagaatatcaggacgacaacggtggatattttaatttgccagtcaagtatggataagtgcacaatacatactagtaacaagtgccgccacaagcctgtgtactagctcctccatgtctcagagatgttgtcccactaacgctgacgttggggccactttcagcctctagaccactaagtgatcgccaagacctactaagccgccactaacgagccgccaagggtctgtaggctttaagtgatggtccacaaaaccatggctttgtcaaaatatgtagacttattactacacactagcatgtaggaaatttgcaatctccgaggttgggtcctctcaaatataacgcctcaaactgactgcagcgtgcatacccgcccgatccactagatccttgtctaaactgtgttttatggtgggagtccattcggttcccaacttcatgtctcagttgagcattattgcgatggtattttttgcctcgttatttacctactttatctactaaccgaaggtggagggcggattgtaccgaagtccgaaccggcctctggcgatcaagggtatataaaataccgtccgcacaggttgcctgatttatgtgttataatcagtgttgctactagttcccttgtccgggaacgactggtccgaatcatgtattccaattttgctatcatgctttggttgctgcttgtgccttccattatcgccgttccaaccatggatgccttgttcaagcttaaaaagaacgaagctggaagtgacacggacagccttggtggctgtgctaagtatctcgacaaaatacttccaaggtggttagccgaaactagtgacatggttgatgctggcctccaggtattcacggatgccggaagttccaccgatagcccaaccagaacggttgcccgggattttctccagacctatttttacatgaagataacggagacggccaaggtaaaggtggtgaagggtgggtttctcgccgcttatacagccttccagattacgttgctgacctcatttaagacagcatcaaagcagtgaggacatttctcgatggggagccgctccaaaggggcacgccacatttctactgcggtgacacatggctcgaaaaggttccgaggagtgacgtggcttgggattcgaatgggaacgatttgatgcaacttgatgtcgatggggttacgttgcgtcctgctacatttgaggaagtgccagcttacaaagaagacttgttttggactaacccaaacacgaacatgcaagagaccactggccgtgttccttattggtcaccagatttggcttcatttctttttgactctgattacgatgggcgaacttactgcgcaccaggaaacggcggcttgggtgcaacgcaacaaatgacgaagcccgctacgatgaccttctgccctcttgctttcgaatacgacctgaataccgaggttttgggagaaaataagccttcagcaaggatgtcaattacgaaggttatcccgcgaagcgcaactctctaccatgagctcatccacctcgtcgttggtactgacaaaacacaagattacacttgtaagttcttgtcggatatgttaggtcagaccaacgctgataacctgaagacgaatggagtaagatgcaaactgcgctcaagaagcccaatggtacgccgtcgaagaaagaagaggaaaaaactgggcaatattgggatggaatgaaatatcaggatatcatgcgtcaaaatcctgagacatttgtcttcttcagcgtggggtattggtattttctgcagactacatggaacaagaatgcgcggaagcggtggagcttcgatactggtgcagctcggctcgtggcgatataggcaaatgacgaaaatggaaatggacattttctagaagcgaaatcgacaaatttggtacacaatcactgttcaaagtttgacagggccttgaaagctgcctttttgcttctttcttatatacagttgcatagaaagcactttgggatttgggacttcacacttgtcctcgcttgttttcacttgtttgtcgctggtttgtttcgtataattttgtacggcagaatacggagtaagatcgtgagagttgctctattaagggtatgaggaatttagtagtagtcgctaccaatagcaaagagtaaatttcaaatcaaaaacaaagacattcaagcaagagtgattggcttgaaatcacaaaactcttccttccattccaaggctccgacgctttctagcttatcaacaaacttctctagtagggttctcgcgtcccacataagatagccactgttggaatatttcccaacatgcctatactcggcgctctttgcgtccgtccagaagtgcggccatagcatcaactgagcttcttggccatgcacgagctctgttccaatggcccatatctttaatggaaggtcggtttgacgacgcttcacaccatgccgcacaccgccaatccctgcagccggttcacgaataccaatcaaatccgaaatctgagtcttctgggcatcggtcactggtgtcaaaaagtatatccagaacaattccacgtaagagcacgttaacgcatcaaaccagctagggcccacatagtcggagctcctctgcgaaaatgtctctcgagaggacgtagctctgattcctctagcttcgaggttctcccgatagagctgggcggaaggcgaggccatgaatgccctcatatccgaggctctctcccatgcttggtggcagttagcgggacgacctttgattcccggttgatacacaactcacctgtaactaaaagaattgtatccgggcgctcctgcactcttgcatacccggaaccctcgtgccctggggcccgaagcagtggctggaaatgtccagcccattcggtatccagctccagtcccttggaaacttgaaactcggtccagattaggattgcttggtcgttgaggtcgtcaacctgtgatcgatctatagtatcatctcccaagggcgccatgactggagagggttgattcggatctgaacaggatttttggagagaacgactgggggcactggggttttactaagggcactagcgctagcgttgtttcgcctttggccactattcaacgcggtccctttcgtttcaatactggtaatgctatggtaaataaaccacgtgacatttctccttggcgttgtgagaaatcatattagtcaccatacttcgaatattgaagctatttgttagagtggtcacgtgattagcatgtgatcagccacgtgatcccaccgagtcctagccaatgagactataccgccgccaagtgcggttgagaaatctgggtttttacaaggatgcggctagtgatgggcgcattgctacagacgttgtgaatcaaagcacttcattactcccaccgttcatgcacgcgagactaaggccgtgcgttgatcaccagagccggataatcccgcaatcctctcagagttgactccgctttgaaatcgtaaatcaaacccgcctgagacaggaggtcagtaatatcccgaatacacaatttattagcgcccggcagctaagccgaaagggcaactatctttgatctactatacatgtcataatatatatagtacgatgtctcctccgagcccatacatgaannnnnnnnnnnnnnnnnnnnnnnnnnnnnnnnnnnnnnnnnnnnnnnnnnnnnnnnnnnnnnnnnnnnnnnnnnnnnnnnnnnnnnnnnnnnnnnnnnnnnnnnnnnnnnnnnnnnnnnnnnnnnnnnnnnnnnnnnnnnnnnnnnnnnnnnnnnnnnnnnnnnnnnnnnnnnnnnnnnnnnnnnnnnnnnnnnnnnnnnnnnnnnnnnnnnnnnnnnnnnnnnnnnnnnnnnnnatctcagatgtccgtatcgcagcggatcctcgtgggttagtaattttgttagtaggctggcttgaaggcgcttctctaagtgttcaacatcctattttcggcagttgaagtgcgtctactatctgtaacacgaggtggttagtgggttagatcggcgaaagggggtgatttatgttcgtcggcatggttaggtgcctcaagtcggcccgtggcgatggcaaatcgtattgaggcccgtaccgtctctgaccctgtctcactagggcgaacatgccaatctttcggtcggttgggtactggtccgtttcgatatatgagagccacgtctgtattgcttcgtcccccttgaccatctccttggctctgccttcagtttctcggtcggggaactcggtgatattggagaccctccgaataatcctcatgctgagaaattccttgaacgtgacctttgaacctgggtgcagacactcgagcttgcttggatttttggtcagggcgtggcaaccgcgcgcgctggctctccattgactgacggtcgagggcaccttcggtgctggagggcggggtgttggagggggttccatggttacttgaaatctgctttttccgatgagtgtttgtgggagaaagatgagaaatcttgcctttccattaacgaaaccaaaggttgttttgagctgacaaagcagcacaaacctccagggctaggtacctacctacctaggtagagaaacaggtcttattgaggcaccagatgaggtcgtattgatctatacagaaattatcctgcaactttaggaccaatagacgatagtttaatcgaaacttcattgaatgagactgccacaaacattgttctgttgctactatataaatgcgtaggcccgggttgttggatgctattgctattgtcgaagatagacaggttggttttgagtataacgagacgttatagggctgtacttaaagataaggagtactacgtaaaatattaaatgtggatcctaagcaaaagatcttaaggtttcaaacatatatcttcaagttcgtatagccctaaaattggtagtgctacttatagatataaaaagatatatattttgtgatggtggggtaaaaatgcgggtgggtaaaatattttgtggtagggtctgtattaaatagctaattcaagctcatagacgtaacagggccgacaagagagccaataataggattcggctcttcaggctatcggaactggctggctcatatcataacgaatgaagagttcaactggtgccgtttcgtcatccgcaaaactccatagctgagaatattgcaaaagcaagctttctccatgtaatgaagcttgaattattcttccatgattctgtccagtgtatgaaagaaccaataactataaaaaaataagtgagtgcttaggaaatctctagtagctaggaagtgtaagtaagatactaactggatggatcgggtggtcccggaacggccgatcggatgttcgagcaaccatcacggttacaacagnnnnnnnnnnnnnnnnnnnnnnnnnnnnnnnnnnnnnnnnnnnnnnnnnnnnnnnnnnnnnnnnnnnnnnnnnnnnnnnnnnnnnnnnnnnnnnnnnnnnnnnnnnnnnnnnnnnnnnnnnnnnnnnnnnnnnnnnnnnnnnnnnnnnnnnnnnnnnnnnnnnnnnnnnnnnnnnnnnnnnnnnnnnnnnnnnnnnnnnnnnnnnnnnnnnnnnnnnnnnnnnnnnnnnnnnnnnnnnnnnnnnnnnnnnnnnnnnnnnnnnnnnnnnnnnnnnnnnnnnnnnnnnnnnnnnnnnnnnnnnnnnnnnnnnnnnnnnnnnnnnnnnnnnnnnnnnnnnnnnnnnnnnnnnnnnnnnnnnnnnnnnnnnnnnnnnnnnnnnnnnnnnnnnnnnnnnnnnnnnnnnnnnnnnnnnnnnnnnnnnnnnnnnnnnnnnnnnnnnnnnnnnnnnnnnnnnnnnnnnnnnnnnnnnnnnnnnnnnnnnnnnnnnnnnnnnnnnnnnnnnnnnnnnnnnnnnnnnnnnnnnnnnnnnnnnnnnnnnnnnnnnnnnnnnnnnnnnnnnnnnnnnnnnnnnnnnnnnnnnnnnnnnnnnnnnnnnnnnnnnnnnnnnnnnnnnnnnnnnnnnnnnnnnnnnnnnnnnnnnnnnnnnnnnnnnnnnnnnnnnnnnnnnnnnnnnnnnnnnnnnnnnnnnnnnnnnnnnnnnnnnnnnnnnnnnnnnnnnnnnnnnnnnnnnnnnnnnnnnnnnnnnnnnnnnnnnnnnnnnnnnnnnnnnnnnnnnnnnnnnnnnnnnnnnnnnnnnnnnnnnnnnnnnnnnnnnnnnnnnnnnnnnnnnnnnnnnnnnnnnnnnnnnnnnnnnnnnnnnnnnnnnnnnnnnnnnnnnnnnnnnnnnnnnnnnnnnnnnnnnnnnnnnnnnnnnnnnnnnnnnnnnnnnnnnnnnnnnnnnnnnnnnnnnnnnnnnnnnnnnnnnnnnnnnnnnnnnnnnnnnnnnnnnnnnnnnnnnnnnnnnnnnnnnnnnnnnnnnnnnnnnnnnnnnnnnnnnnnnnnnnnnnnnnnnnnnnnnnnnnnnnnnnnnnnnnnnnnnnnnnnnnnnnnnnnnnnnnnnnnnnnnnnnnnnnnnnnnnnnnnnnnnnnnnnnnnnnnnnnnnnnnnnnnnnnnnnnnnnnnnnnnnnnnnnnnnnnnnnnnnnnnnnnnnnnnnnnnnnnnnnnnnnnnnnnnnnnnnnnnnnnnnnnnnnnnnnnnnnnnnnnnnnnnnnnnnnnnnnnnnnnnnnnnnnnnnnnnnnnnnnnnnnnnnnnnnnnnnnnnnnnnnnnnnnnnnnnnnnnnnnnnnnnnnnnnnnnnnnnnnnnnnnnnnnnnnnnnnnnnnnnnnnnnnnnnnnnnnnnnnnnnnnnnnnnnnnnnnnnnnnnnnnnnnnnnnnnnnnnnnnnnnnnnnnnnnnnnnnnnnnnnnnnnnnnnnnnnnnnnnnnnnnnnnnnnnnnnnnnnnnnnnnnnnnnnnnnnnnnnnnnnnnnnnnnnnnnnnnnnnnnnnnnnnnnnnnnnnnnnnnnnnnnnnnnnnnnnnnnnnnnnnnnnnnnnnnnnnnnnnnnnnnnnnnnnnnnnnnnnnnnnnnnnnnnnnnnnnnnnnnnnnnnnnnnnnnnnnnnnnnnnnnnnnnnnnnnnnnnnnnnnnnnnnnnnnnnnnnnnnnnnnnnnnnnnnnnnnnnnnnnnnnnnnnnnnnnnnnnnnnnnnnnnnnnnnnnnnnnnnnnnnnnnnnnnnnnnnnnnnnnnnnnnnnnnnnnnnnnnnnnnnnnnnnnnnnnnnnnnnnnnnnnnnnnnnnnnnnnnnnnnnnnnnnnnnnnnnnnnnnnnnnnnnnnnnnnnnnnnnnnnnnnnnnnnnnnnnnnnnnnnnnnnnnnnnnnnnnnnnnnnnnnnnnnnnnnnnnnnnnnnnnnnnnnnnnnnnnnnnnnnnnnnnnnnnnnnnnnnnnnnnnnnnnnnnnnnnnnnnnnnnnnnnnnnnnnnnnnnnnnnnnnnnnnnnnnnnnnnnnnnnnnnnnnnnnnnnnnnnnnnnnnnnnnnnnnnnnnnnnnnnnnnnnnnnnnnnnnnnnnnnnnnnnnnnnnnnnnnnnnnnnnnnnnnnnnnnnnnnnnnnnnnnnnnnnnnnnnnnnnnnnnnnnnnnnnnnnnnnnnnnnnnnnnnnnnnnnnnnnnnnnnnnnnnnnnnnnnnnnnnnnnnnnnnnnnnnnnnnnnnnnnnnnnnnnnnnnnnnnnnnnnnnnnnnnnnnnnnnnnnnnnnnnnnnnnnnnnnnnnnnnnnnnnnnnnnnnnnnnnnnnnnnnnnnnnnnnnnnnnnnnnnnnnnnnnnnnnnnnnnnnnnnnnnnnnnnnnnnnnnnnnnnnnnnnnnnnnnnnnnnnnnnnnnnnnnnnnnnnnnnnnnnnnnnnnnnnnnnnnnnnnnnnnnnnnnnnnnnnnnnnnnnnnnnnnnnnnnnnnnnnnnnnnnnnnnnnnnnnnnnnnttaaattgtacagagccgtcacctatcatgccaacttgctggctatagactccgaggccttggagatcaccgggggaaagaaaccaagattcgcaactcttaagtagcttgtagagtcgcttaacttcatcgcaacgcctagtctgggtttgtttatccattttcgtgtgagaggggaagagtcaagaaacccgagaacgaaagaaaatcaatagaattgatgatggatggaagtgacgatggagtgtggtcgccaatatgttggatggtcaggtgaccttaggcaggccacggagacgtagacctcattaaaaacattttgagggcgggcactctgaggggccctgtgggggctaatctcttctgggtatagtctgaggtgggctgagtgcatcagtgttgctcactgattggacactgagtatcactcagtcatcctgcacgtgactgatatgagcatgatcactgatctgagcccgtgctgacatctactcagtgagcctgagcctgagcaccctcataaaagcggcggcagctcaaataggaaagccccacccgccagggaatatccggtacgtattggcatgtagagtgatccactgcctgacactaacttagagcctcgtcacggcctttcgtggcccactgccgcttccattgttaggctgccctcatggcgcacgactacgaaaccgctgtgacgcctcggcgaagtccaatacggcctgaaccgtcttcgccctcgagagggtgtctggttcacccttctcaccttcctttgagcctcccagcaggctcaacacgctgttcatcgcgttcccgactttccttctcaattccgtctgcagcatacggagcctcgggcattccgtcagcacgtgcctttggtgctttccttccactcctgactccattgggcataaattttactgcggacggatgcgttctctctcgatagtagcggtcggaagggatgggttttacccggttgcgcggcttccttagcaagtcgatctgctgcatcattcctgacattcccacaatgtcctggcatccactggaggcggagtctgatattctctgcctgaacctcggaagctgcctgtatgattgcaaggccgatctgctgtcacataagattgttgccgttgaccgtactccatctccggcatttgtgcgccggtgggctagcttgaacaccatgtcgaccgcgtagaagatgccaataagctctgctacgtggaccgaccagcgttccatcgggcccacctgcacctgttgagatttcaccacctcttcctggtcgttgagtgcgacgatggcagttccaagatggtcttcacgtccggaagcgtccgagtagacaacaatatcggacatatttctcactgaatctgcccttcctctcgctatttctcgatcgcttccaagctcaatttccgagaatgcgtttgctcgccacggtggtaatggacttgggtcgatcgtttctagctcattcagcctgtcgacgtccatagtcttcagcgcttctgcaagaggaaagcgcgcgtacgatcccacattgtttctacgattctgggcgcgcgataacgcgctccaaatgggatgggcacgaggtggagtgtgtagtctcgctatagtgcgttgcgctcggtggcgaagacggagatgcgtggggggtaggtaggcttccacttcaagcgttgttgtcgctaccgttcggaatgccgataggattcgaatcaatacggttctctgaactgtgttcaagtgtcgcaggtgagtcttgtcccggagcgggtcatgccagaccgttgatgcatagtctataataggcgtaacgcatttgctcttggcgtaagtggcgtagaccacttaaagcgacggtcgtcttggtagcacgtttgatggcctgctgaacgtgttccttccaccgaagttcctgatcaaacaccacccccagcagtttgactgaaggcgatggtttgacgtcggctccatcgaaggtgatcctcccttctaagtgttctcccctctttctggtgaggtggatgagctcggttttctccgccgcaagacacgatcctgtcctctatacgaggaacatcctcggactgtatcttggctaaattttcctcggccgagcgacccactcgctatcggaagtagtcgtcaatgaatgctgacgcgcctccgtgggagtcgacgggctggacgaccagatcggcgttaaagaatgcaaacaagatgggggagagtggtggtccttgcgctaggcctgcattcaccagcagctcggtctcggtgcggaagtcgtcaaatccaatgttggcgtgtcgaccgctcataaagctcgcgatccatttccttgctaccattggaatacctctcgtctgtaacgaggcatccagactcacccggttcaccccattgaaggcgcccttgagatcgaatgcgattaacgtcaccaccttgtgtttgtaccaggctttgtcaatcgcactagacctcctccgagccaaccttcagggctgggatacacccccatatttctcgaggtttcatgtatgtggcagctttccagagctttccttcgccggcctcgtctaggaactgtctccaatgcgaagctttggccttctctatagcccgcgtccacgctcggcgcttttgttacataagttgaaaggctgtaatggtgttgacatgttctcgtccaagctccgcacagcttgcctgccatcttctgcgcagttgattcccttcgacttgttggaccttcaggtctggtgtaaaccaccgtttggagtatggtgttgggcgagtgtcgggcgtgagctggtccacagcctgggctgtagctgatatgagtttctccacaactcggtcgagtcctggccgggtcttaatgcctttccaggggcccgtctgtcgggctacctcctcgccgattctggcccagtccgcgcgatcatacacttttctcgctttgttgtttggcttattctgaggttgaatgttccattccgaatacgtcgcgcggtggtctgacccgtagttttcatggtacagatggcatttgacaagtagttccgggttgtttgtactgtctgatcgatggtcgagctttgtcctggattattcaaggcccagtaagtcgccgttcctcgcgggatacagctgtggaggttgtgggtttggaaaagtcgatcaggtcgcttgcttcttcgataagtcgcggttggatgtagttaccgccccaggttgggtgatggcggttaaagtctcctgcgagaacgatacttgtgggtcgtcgaccatcgcgtagagcagctgtgatcgtgttttggatggcggtgaatgctggttctggcgacgcactatctggcgtgcccagcgggacagatgggatataaacagaaaagaggaggagttgagtgtcggctgtccagatcttgacggcggcgatatctgggtggttgcaaagaatctgccggtgtgaagacgttgagattcgcttgttgacgtagattagactccggaatcgatctgcgccggtctcgggggttggtcggtatagccgccaggcgctgtgattgacatgtgtttggtaggtggtgatcgagggctcttggatcagaagtacatccaagttttgggtttggtggtcattgatgagtgcttccatcctgggtcccgatttcatgatgttcaactgtagtatgtgcaggttcgtttctaacattgatgggggttggacgttgcgggtgtagcacactgtcggtcaccagttgggtgttcaccactacaatccaggcatttggccctgatccctggagggcatcgttgccgctcgtgttgacccgcacaatgtccacaacgtggtgtttccttgcnnnnnnnnnnnnnnnnnnnnnnnnnnnnnnnnnnnnnnnnnnnnnnnnnnnnnnnnnnnnnnnnnnnnnnnnnnnnnnnnnnnnnnnnnnnnnnnnnnnnnnnnnnnnnnnnnnnnnnnnnnnnnnnnnnnnnnnnnnnnnnnnnnnnnnnnnnnnnnnnnnnnnnnnnnnnnnnnnnnnnnnnnnnnnnnnnnnnnnnnnnnnnnnnnnnnnnnnnnnnnnnnnnnnnnnnnnnnnnnnnnnnnnnnnnnnnnnnnnnnnnnnnnnnnnnnnnnnnnnnnnnnnnnnnnnnnnnnnnnnnnnnnnnnnnnnnnnnnnnnnnnnnnnnnnnnnnnnnnnnnnnnnnnnnnnnnnnnnnnnnnnnnnnnnnnnnnnnnnnnnnnnnnnnnnnnnnnnnnnnnnnnnnnnnnnnnnnnnnnnnnnnnnnnnnnnnnnnnnnnnnnnnnnnnnnnnnnnnnnnnnnnnnnnnnnnnnnnnnnnnnnnnnnnnnnnnnnnnnnnnnnnnnnnnnnnnnnnnnnnnnnnnnnnnnnnnnnnnnnnnnnnnnnnnnnnnnnnnnnnnnnnnnnnnnnnnnnnnnnnnnnnnnnnnnnnnnnnnnnnnnnnnnnnnnnnnnnnnnnnnnnnnnnnnnnnnnnnnnnnnnnnnnnnnnnnnnnnnnnnnnnnnnnnnnnnnnnnnnnnnnnnnnnnnnnnnnnnnnnnnnnnnnnnnnnnnnnnnnnnnnnnnnnnnnnnnnnnnnnnnnnnnnnnnnnnnnnnnnnnnnnnnnnnnnnnnnnnnnnnnnnnnnnnnnnnnnnnnnnnnnnnnnnnnnnnnnnnnnnnnnnnnnnnnnnnnnnnnnnnnnnnnnnnnnnnnnnnnnnnnnnnnnnnnnnnnnnnnnnnnnnnnnnnnnnnnnnnnnnnnnnnnnnnnnnnnnnnnnnnnnnnnnnnnnnnnnnnnnnnnnnnnnnnnnnnnnnnnnnnnnnnnnnnnnnnnnnnnnnnnnnnnnnnnnnnnnnnnnnnnnnnnnnnnnnnnnnnnnnnnnnnnnnnnnnnnnnnnnnnnnnnnnnnnnnnnnnnnnnnnnnnnnnnnnnnnnnnnnnnnnnnnnnnnnnnnnnnnnnnnnnnnnnnnnnnnnnnnnnnnnnnnnnnnnnnnnnnnnnnnnnnnnnnnnnnnnnnnnnnnnnnnnnnnnnnnnnnnnnnnnnnnnnnnnnnnnnnnnnnnnnnnnnnnnnnnnnnnnnnnnnnnnnnnnnnnnnnnnnnnnnnnnnnnnnnnnnnnnnnnnnnnnnnnnnnnnnnnnnnnnnnnnnnnnnnnnnnnnnnnnnnnnnnnnnnnnnnnnnnnnnnnnnnnnnnnnnnnnnnnnnnnnnnnnnnnnnnnnnnnnnnnnnnnnnnnnnnnnnnnnnnnnnnnnnnnnnnnnnnnnnnnnnnnnnnnnnnnnnnnnnnnnnnnnnnnnnnnnnnnnnnnnnnnnnnnnnnnnnnnnnnnnnnnnnnnnnnnnnnnnnnnnnnnnnnnnnnnnnnnnnnnnnnnnnnnnnnnnnnnnnnnnnnnnnnnnnnnnnnnnnnnnnnnnnnnnnnnnnnnnnnnnnnnnnnnnnnnnnnnnnnnnnnnnnnnnnnnnnnnnnnnnnnnnnnnnnnnnnnnnnnnnnnnnnnnnnnnnnnnnnnnnnnnnnnnnnnnnnnnnnnnnnnnnnnnnnnnnnnnnnnnnnnnnnnnnnnnnnnnnnnnnnnnnnnnnnnnnnnnnnnnnnnnnnnnnnnnnnnnnnnnnnnnnnnnnnnnnnnnnnnnnnnnnnnnnnnnnnnnnnnnnnnnnnnnnnnnnnnnnnnnnnnnnnnnnnnnnnnnnnnnnnnnnnnnnnnnnnnnnnnnnnnnnnnnnnnnnnnnnnnnnnnnnnnnnnnnnnnnnnnnnnnnnnnnnnnnnnnnnnnnnnnnnnnnnnnnnnnnnnnnnnnnnnnnnnnnnnnnnnnnnnnnnnnnnnnnnnnnnnnnnnnnnnnnnnnnnnnnnnnnnnnnnnnnnnnnnnnnnnnnnnnnnnnnnnnnnnnnnnnnnnnnnnnnnnnnnnnnnnnnnnnnnnnnnnnnnnnnnnnactctcgatctgcactttgactcatgcaaaacgttttggcaacgctctctatcattttggggggtggcaattgtcccggcatgttttctcagctcggctccttgcacctctgatacattcggtgttacgcagtacttgccgaaaacgcatgaatatgttttggatacaataagctatcattcaattgagatgattggaagtattctactcggggcgccatatcacgactcgagccatcttgcacttatcctgtacagctacttgtcacttgattccttaaccacaatgacgttcaacatcataaagtttcgccccccgctgtatcatatccagccaccgtttaacacgtggtttcagcaagaattgtaaaatctactgttctcggcccacattgatggatgaaggaaccaggtccaccgttcattcttttagtctccattacttcatcgctcgaattcgtggccaaccaacatacaagcaactcaagtccgcacatattgccacctgaggtgcaatagtcattggacgattggcgtatcatccacactaaaagatggcttttaaatgtggatggtaatttgctataaaatgttttagaatcttgcctgctacgtagtgggaagttagatacaaactaacattggacaaacttgatcgagaaccgaagaattgtcgacaggtgacacacgtgttgtgctctcctctgctgcgctagtttttgggctgtttcaaattggatgtcgcaggagatacagtagttgtgttcagttccgaggtgctcatcaagctcaaccatctccgcgaaatcttgtggtgggaaacaaatgtagcagatatgatgatatggagagtcgtagatatgttgcagcctcgcgaagaaagttttaaagctgattgcgcagtgcgtgcaataaaattgtttcagaaacatgatccaggattgttaggatgttccccttgagcgttgggagcaagaagaacaagtgattgtttgtttactgaatgaagtcggtgcggagaaaggtggtggggcttttgaccgtgtttgagcttttgtgactcgtaggcccaccctttattccaatcaagctacatatttggtagatccggtcgacacaatgtcaatacgagatgcctctttacgccgagggagttccggaccagattctgcatctggatatggtcgaaaagaatgatcaggaatcaggaatcctgatcattctgatattgccttctgccaggcaaggtgatgcgaaagaatactgtcaatagggtttgcaagaacattacaggtaatttatagagcctcacatcacgtgagagccagtttcaatacgattcggcatttgaaaataggctcagcctgaactagattggcgtgtttcggaatggggtacaagaaagatttcacgagagtaaagtggtgaaactgatttcgatccatgctgtacctggtcatgaagaaacattgttcattattgccgtttttccagaaggagtccagccctttccaaggtattggctggagcagcttatgtcttcaaggaggcactgaattatagagcaatttgtttgtctcgagctaggatctgattcctcataccggcggcaaagtgacggcaaaaatgttaatttgttgactgactcatggcttcgaataaggtcgttcatccagcgatcgatggcattcaaatcccaatggccattggaggatttcaaatatgggtgttgtttggttatggagatgattttacgttcaatttatatgactactcacgtggtatatcgggacagcttctcgagatgctgtgcgattgtgtgaaagttttcgcgagattctgagaaaaatggtaggtccaaagcacaggccatattgtttctgagggcaggtcaagacaatatctccaccagcacaatatgttcgtagcagcctatgttgctctggccgggtgctcttggttttcggtaaaagcctcggagggtcaccagcctcctgcagtttgatgaccgtatttaaacgaacggtcgttagtatgtccaaaggctggtcaaatttagcaatgtgttctggagtattacttagttaccgctcgtcgaggttgatattttctacttgctgttaaccgttgctcctgcgcaaaccgaccggcttattgttgagcattttgtgagatgtaaccgaaagattgtttatttgccaaattgtgagctcgttttttacacatgttgggtcctcatttcatggactttatagttgagacacgatatgttgaagtatgcaagtttgccatgttttttttctatctagtgtctgagatatttgggcattgcagcctacttttcgttatagatatgccaaaagtactatttatgggtcccaccagtgttggtttgatcaaatccagcaactcttgccatggccctcaggaaactaggacataaaaaaatcgggcccgcaaatcggtggttacggtgacacaagaaggatctttggattagccagggaaaactgttcgacaagcctgcctacagagttctattctggcttttctaccagttttatgccatggacggcgccgtcgctctgggtaacccgggagatattcactcctagaatagcaagaatacgcttctggaagaactctcctaccaaagacctatgactgagaggacggcaggtccgtgagaatgggtttttcccatggctctccctccattgacactctcatcgtatttctgctgacagtagcgccgaagactgaagttgtctatggacagagaggaaccattcaataacaagttctctggtccattccatgtttgagcatctgcaaattccattgtcttcaatattcatgtctagtttaacctcttttcatgcctccacgatcctcgaaacttatgctgtacgaatgcctcctctggaatcgatccgtcattcgtactgttagaatgtgactggcccatcccaaacccatcgattggcagtatcaggatatcccccacaagcctcggttccgtcaatccactcaagtcgcttaacgacgtaagatccggctcatcctgctgcaattgtcggaagacggcatctgtccaagcagatggcccagtcaatttcatgacttccgatgaactgacatggagctccgagaatgttgtttttcttgcggttgtgagtttttcagggtggtcatggacgcagaaagtgggcccccggggataaaggaagagagtttgtagttaaaactgatttcgaatatcactgtatacttcctgtcaacgtaagctgacaatctaatatatgtcgtcaattgtatatcagtccttccttccagtttaggtaggattagcacaagccgtcgcactgctaataccctggactagagatgggctcgttagctctgtccttggtcgctatcactagagaatgatgagcagtagacaacaggccgcggtgacaaagtctgccgttacagtaccgtattgcactcagagaacccgatcgccgtgaacacatcaattaaaatctccttctatgaactagctgagcccaagaagcttcgcaaataaaccttgacatgcccatggttgcgttccttggcgatggcatacgccgtctggccatttgaatctttcagtcgttttttcagaccacgctgattggccagcaactgtacaacctcataatgcccaccagccgcaccccaccagaatgatgttctcccttgctcgtccaccgtattcacatttatgttgggatgctccaataatattttggcaatctcaaatctaccttgagctgacgcaaacatgagcgcagtaaaggagcaagggccttggtcattgatcaacaaagattcctcgtagctgagaaggagaaggacaatgtcgacgtgctccatgattacagcgacctgaagtggcgacgtccccgatggtcttttttggttaatgttggctgaattttgcaagagaaattccaccattgaaaattgtcctgcgcgacatgctaaccagagcggcggaaatgcattggcagattgagggtttttatgaagccgcggctgttggaagaggactttggccaattctaaggagccatttgcagcagccattgccaaaggtgtctggcccagcttgtcggcgcaattgaggtccaggtttgtttgccgtaagaggagctcagccagttttatgtcggaattgttcactgcataccagattgcagtgcggccattctcatcttgataattaaggttgatacatggacttgaaagcaaggcttcaaggataagtagtcttttgttgatggggagaaaacaaccgtgtcctttaacagccagaagcaacggagtttcctgtcggtggttgagacagttgacatcaactcgcggatttcgtacaagcatttgtattactccatagtcgcctatttctgttgctaggtgcagtggtgttcggccatcatggtcgcagatgttgacatttgtccgctcatcagacaagaaaagttggaacatataggtttggcgacaggtcagcgcaattgaaatgggcgcgtctccgtccagggattgattattgagatcaatattctgtacattgaggagtcgttggacaatgttgacgcttccatgcagaacagcgatcgagaaggcactttctcccaaggtattacgctgtatgacttttactgaatgatggctcaagagcaaatcaacagcgtctgcgtactgcagctttgtagccaacatgagaggtgtaaggccagaaaatgtttggttgatatctgccttttcccaacccagaaagtgctggatgatgcctaactttctatgttcgattgcccaatgaagtggcggggtgtcttggaagtctatgcaatcaaagaggctctttctgaagatgacgagggatcctcgagatgcgagacacagacttcgaatgtccttcacctccatgaatttcacaatccacaaaagtgattctagtggaagtcccaaaagcagcatcttggcggatttcgtgaacgtatagttaacgaatacctatagagataataatgaaaggagggctcagagtaataattcagagataagtttgtcaccgccagcagttggctgaggagcttgggagacgcattcctttgaggcagtggcttcttaaatattttttgagggcgtatcatttatacggatttattcaagtggagtcaagtcaccggcttctaggatcgcgatacttactcctgggatcctgcgactggtttcctaggagccctaacgatcccgggatatgttacaatgctcccaggaagcactcacccattcctgggagttacgcatcgtatgggatatacatgaagcatacaagctaaattgagatatgatctgcgggtcccacatggtgcatatgggatcccctccagcgaaagcttccacgcgctacgtcgtgtatctagagtggactatagactttcttgatgttgattattcattcggaagacgctgtcctcagaaacacccggaatattgtggcttgacatcaaagttgacgatcttataccggtgaggccgacgtttacaccgcgggaacgtcagcaatgcataagccctcaaaaaatattttaaatagagaccattggccttgaaaattagtatctgacaattatcttatttcttctacgagtgataaatcgtctgaaaacccaaaaccgctcatgcctccacagagaagacatgtggcgtcgggccgcccgaacccataccccttaccaatcgtttatcaaggtcagtctgggattgaagtaccatgacggttccgaattaacctaactcaggcacgcaacatgcaaatcaaaggctcgagggaatcattacgagcatatacgcagaaatgtcaaaaatacaacagaaacactacgaggcaactgttatgctacaaaactgcgacaatatgttacgggcccacgcaatggacaaggccgacttggagaggcagaaccagtgttttattgaacatatcaagatagctcaacaaaaagcttgcaacctagagttcaagaataaggaactcgaataccaactggcaaaagtgagacagctgcaccccaaacaaccagaagggaggcagagttaaaaatttactgttgaagttacaaactttgcccagttaccaattgaatgacgccataattgatggccaaatgaacaggagctataatgcccatttctgtggattaggacatgcgaaggatcattttgttgcggcgaccgttctgaaacgagattatgtgaaaggtaggcagtgccttactttgccttagcccgcacgaaacagactaggaacagatggaggcaatgtattacctaaatcagggtcgtttcagagttttgtatcaacacaatgttgcaatttcagtgtgcgacaataaaaagcatgagattgccgaccaatgaatccctttgactctgtctccctagaattcgtgcaagaacaaaggggagttcaactgaccctatgcccggattgccagctacggtgcttgctagattagttctgtgttgtaggttccaacgccatgacaagaaaatggtttaagagttcaataagtctgttttatgctctttacttatcgctagtcattcctagacggcattgtccctcccaggaacctccgagtctcccgggagcctgatacaagctcctagaaaccgaataaatgctcccaggaacggcacgggtagtcccaggagtccctgagctcccgggaacttagaaagaggctcccgggagattcggtggttcctgggagcgcatgtcgctcacctgggagtgcataacgccatcctgggatgagcaagtttctacgtactcgggtcgaactcgtagatcgctcttaccgctttttcatttttgtccacaggctaaccatagaaattgcaatcccattctagacatgtgaccgaggatataggttggtttcgacagtgctatgaggttcgatttgggcagcattttctttagaaggctatcttatgctgacataccatccttaagaagttgggaggaatcgcagattacgtgagatagctagagattaaatacttagcagatcactcaggagctgtaatataatacaaaataaaacatacatggtacgttacattacactcagtaattacttactaatttttcttgtcgtatgtggcggtgcagattatgtaactgtaatgtaactgtctgtttccatgtaataagctggctgtattgggttttcaccagaacagccaacaagttgcttgcattgctagtcttcacggtctgtgtcctgttgcccactgcagttattttccggataggttcaatcaaatacgactagaaataaggactcgactatcatttaaagggctatccgcgggcccacctaaaaaggaagctcatcatgcttcaaacttgtgcgctgaaagtgtagggtgtttgcccctcgagttttaacgtacatcgcgtttactctttagaaaaagtgtccgccattctgcagaaatttgagccatttaatttctaactgatcccttatttttgcacagctaggaactttccgatggtgtgacaaggagtctagttaggtcggcgagggttggactgcgcggctgaatagcaaattttgtacagactgatgataaccaagcacaagtgaaatattattgattgaaaaaatgactcagttgctctttcaattggcccgagatctggtgcgtctctgagaaggcttcaattccatccatgcctgtcgcagtaacgccatatcaatatccgcgaaatgaggcccgatctgtctcagggtcagattctgtctctgtaggtcacgcaactttcgtttgttctttgcattaagcctctgtcgaggcttgcagctgttcnnnnnnnnnnnnnnnnnnnnnnnnnnnnnnnnnnnnnnnnnnnnnnnnnnnnnnnnnnnnnnnnnnnnnnnnnnnnnnnnnnnnnnnnnnnnnnnnnnnnnnnnnnnnnnnnnnnnnnnnnnnnnnnnnnnnnnnnnnnnnnnnnnnnnnnnnnnnnnnnnnnnnnnnnnnnnnnnnnnnnnnnnnnnnnnnnnnnnnnnnnnnnnnnnnnnnnnnnnnnnnnnnnnnnnnnnnnnnnnnnnnnnnnnnnnnnnnnnnnnnnnnnnnnnnnnnnnnnnnnnnnnnnnnnnnnnnnnnnnnnnnnnnnnnnnnnnnnnnnnnnnnnnnnnnnnnnnnnnnnnnnnnnnnnnnnnnnnnnnnnnnnnnnnnnnnnnnnnnnnnnnnnnnnnnnnnnnnnnnnnnnnnnnnnnnnnnnnnnnnnnnnnnnnnnnnnnnnnnnnnnnnnnnnnnnnnnnnnnnnnnnnnnnnnnnnnnnnnnnnnnnnnnnnnnnnnnnnnnnnnnnnnnnnnnnnnnnnnnnnnnnnnnnnnnnnnnnnnnnnnnnnnnnnnnnnnnnnnnnnnnnnnnnnnnnnnnnnnnnnnnnnnnnnnnnnnnnnnnnnnnnnnnnnnnnnnnnnnnnnnnnnnnnnnnnnnnnnnnnnnnnnnnnnnnnnnnnnnnnnnnnnnnnnnnnnnnnnnnnnnnnnnnnnnnnnnnnnnnnnnnnnnnnnnnnnnnnnnnnnnnnnnnnnnnnnnnnnnnnnnnnnnnnnnnnnnnnnnnnnnnnnnnnnnnnnnnnnnnnnnnnnnnnnnnnnnnnnnnnnnnnnnnnnnnnnnnnnnnnnnnnnnnnnnnnnnnnnnnnnnnnnnnnnnnnnnnnnnnnnnnnnnnnnnnnnnnnnnnnnnnnnnnnnnnnnnnnnnnnnnnnnnnnnnnnnnnnnnnnnnnnnnnnnnnnnnnnnnnnnnnnnnnnnnnnnnnnnnnnnnnnnnnnnnnnnnnnnnnnnnnnnnnnnnnnnnnnnnnnnnnnnnnnnnnnnnnnnnnnnnnnnnnnnnnnnnnnnnnnnnnnnnnnnnnnnnnnnnnnnnnnnnnnnnnnnnnnnnnnnnnnnnnnnnnnnnnnnnnnnnnnnnnnnnnnnnnnnnnnnnnnnnnnnnnnnnnnnnnnnnnnnnnnnnnnnnnnnnnnnnnnnnnnnnnnnnnnnnnnnnnnnnnnnnnnnnnnnnnnnnnnnnnnnnnnnnnnnnnnnnnnnnnnnnnnnnnnnnnnnnnnnnnnnnnnnnnnnnnnnnnnnnnnnnnnnnnnnnnnnnnnnnnnnnnnnnnnnnnnnnnnnnnnnnnnnnnnnnnnnnnnnnnnnnnnnnnnnnnnnnnnnnnnnnnnnnnnnnnnnnnnnnnnnnnnnnnnnnnnnnnnnnnnnnnnnnnnnnnnnnnnnnnnnnnnnnnnnnnnnnnnnnnnnnnnnnnnnnnnnnnnnnnnnnnnnnnnnnnnnnnnnnnnnnnnnnnnnnnnnnnnnnnnnnnnnnnnnnnnnnnnnnnnnnnnnnnnnnnnnnnnnnnnnnnnnnnnnnnnnnnnnnnnnnnnnnnnnnnnnnnnnnnnnnnnnnnnnnnnnnnnnnnnnnnnnnnnnnnnnnnnnnnnnnnnnnnnnnnnnnnnnnnnnnnnnnnnnnnnnnnnnnnnnnnnnnnnnnnnnnnnnnnnnnnnnnnnnnnnnnnnnnnnnnnnnnnnnnnnnnnnnnnnnnnnnnnnnnnnnnnnnnnnnnnnnnnnnnnnnnnnnnnnnnnnnnnnnnnnnnnnnnnnnnnnnnnnnnnnnnnnnnnnnnnnnnnnnnnnnnnnnnnnnnnnnnnnnnnnnnnnnnnnnnnnnnnnnnnnnnnnnnnnnnnnnnnnnnnnnnnnnnnnnnnnnnnnnnnnnnnnnnnnnnnnnnnnnnnnnnnnnnnnnnnnnnnnnnnnnnnnnnnnnnnnnnnnnnnnnnnnnnnnnnnnnnnnnnnnnnnnnnnnnnnnnnnnnnnnnnnnnnnnnnnnnnnnnnnnnnnnnnnnnnnnnnnnnnnnnnnnnnnnnnnnnnnnnnnnnnnnnnnnnnnnnnnnnnnnnnnnnnnnnnnnnnnnnnnnnnnnnnnnnnnnnnnnnnnnnnnnnnnnnnnnnnnnnnnnnnnnnnnnnnnnnnnnnnnnnnnnnnnnnnnnnnnnnnnnnnnnnnnnnnnnnnnnnnnnnnnnnnnnnnnnnnnnnnnnnnnnnnnnnnnnnnnnnnnnnnnnnnnnnnnnnnnnnnnnnnnnnnnnnnnnnnnnnnnnnnnnnnnnnnnnnnnnnnnnnnnnnnnnnnnnnnnnnnnnnnnnnnnnnnnnnnnnnnnnnnnnnnnnnnnnnnnnnnnnnnnnnnnnnnnnnnnnnnnnnnnnnnnnnnnnnnnnnnnnnnnnnnnnnnnnnnnnnnnnnnnnnnnnnnnnnnnnnnnnnnnnnnnnnnnnnnnnnnnnnnnnnnnnnnnnnnnnnnnnnnnnnnnnnnnnnnnnnnnnnnnnnnnnnnnnnnnnnnnnnnnnnnnnnnnnnnnnnnnnnnnnnnnnnnnnnnnnnnnnnnnnnnnnnnnnnnnnnnnnnnnnnnnnnnnnnnnnnnnnnnnnnnnnnnnnnnnnnnnnnnnnnnnnnnnnnnnnnnnnnnnnnnnnnnnnnnnnnnnnnnnnnnnnnnnnnnnnnnnnnnnnnnnnnnnnnnnnnnnnnnnnnnnnnnnnnnnnnnnnnnnnnnnnnnnnnnnnnnnnnnnnnnnnnnnntgttagtttatgatggtctcagggaggaagttacgaataaaccaaccatttttatttcctttcgatcgtctgggatgattttaatttttgtgaattgttcgaatccaccaaagaactgttcggcatgcgcactcacggttcttaccgtaggtagcccatcatcgttcagtcgcccttgagtagaatttgcgtaccagcgaatgtacgccttgatcatctcatgagttggagccggagaaccaagggaggtttggtaatattcaaacccattctccgggtctgtagtgaaactaaaggaaggtcagcagaatttataataggaaagggattgccacctcagatgcggcttaactcactcgagccagaggttcatagtttcttgatgtaatttgttggtcttggggagtcttctgtctttctcccgaattgagtcctcctctctatgggccccagggacataaccattcttttctcgttgtagacggcgcctctccatggcgattccatcgcgcttggcaaaaaagtcttttctgcccataatcaagtgcggtgcgacctggaggtaggggatgtatgcaaagtaaaagaatgcgatattagattaatgtaccaaagaaaaggcgctaggcgtgttggttattacatgctaatgctggcacacggtctgcctttataattgggactttgagctcgagccgctctgaattagaagacaaaaggaagacatcatgaaacggatgaagttctccgctctttcctgcgccccttcgtcataatgtattttcttgatgaggtgcagtgcttcggaaaatgagggcagtagcaatgctatcaacgaactaactatcacagtataaacgaccctgtgggggctaatctcttccgggtatagtctgaggtgggctgagtgcatcagtgttgctcactgattggacactgagcatcactgagtaatcagagagcatccaatgagcactcactgagcactcactgagcatcagtcatcctgcacgtgactgatatgagcatgatcactgatctgagcccgtgctgacatctactcagtgagcctgagcctgagcaccctcataaaagcggcggcagctcaaataggaaagccccacccgccagggaatatcctgtacgtatagtggcctatgtaacggattttccctggagggtggtgatttcctatttgggatgtcgccgctttagtaagggcgcaccactcagactcaggctctcggagtagatatcagcacgagctcagaagggatgaactcagtacagtcacgtgaatgatgactgatactatgtaaatgcccattggatgctcactgatcacttaccctctgtgtccaatcagggagcaattctgctcaccatatgagtggaacagccccatatttcccttttcttattgcagtggggttccagagtaagatgactaaaccgccatgtgattaagggcactcccgaggcggagatagcaacgcagacacctctccacctttccattctcagtagccatcccatggtgtttcctctctagcaccctactcccagtaacgactctgatctcacacctgtgtcgcaggcagggctgtctgtgcccctgtccctgtagcagggtcccctcttcaatatgaaggtgaatatattgttagaatgccttgcaaaccaatcaaacaggggaataagatatttgcacagcaaagcatgactatatctgggcatttacatggccatagtagccgtatttggggtatcgcagagatttttcactgccctgatatcagccctactggtgcaatggtgcttagtatgatcaaaaagcttgctacgatttctcagtaaaacccttggttgcaaagtggatgtaaaagccggtggaaaagaagttgaagacgcagggtattgctgagtagcaggtagtcgcaaatcaatcctaggaagcttttcaatcatactcagcactattgcaccagtagggctgatatcagattagcgaaaaagctctgcgatacttaagacggctactccatgtaaacgcccagatagtataaccatgctctgctagtgcaaatatcttataacccctgtttgattggtttacaaagcatttaacgatattaacctctattcctgtatattgacttggtactgtggtactatttccttcaaacatggcccattgagccagccgtatcctcctatttcaggcttgccaatcagccttttggatactgtggtcactgaagccaccgagaagagaaaagatttgtaagaatatctcatatctttatctaattgtgactaagctgctactacgaactctaatggcggtagtcatttacttgtaaaggcagaaggcagcgagtaaaacctgctttgtgatgattaagtccttcctagtagccctcgtaggcccctcgctagagctaagatacaaactcagtcgcttcagtattctaatcatgtgtcacccttgggtaaacgatccccggcgccttcttcatcttttctttagcaggtaatcgagcactcggaatgcgccgctatggatactttgcatgtccttctttctttctttaactctagactgatggaggcagataaaattgacatatgagctgcaccgaataagatttgcatcaataggaatgtataacattaaaaatagctctgaaatcattttcaatgcgcggctgctttcaaaatgatgacaagttgatactcgtgaatggcttcatgctgcagaacaaccctcgatccacaacagcacagatttcatcttctctttctcccaaggacgaaaagcaagccaactgttccattctcatcattaaaccccccggggtacttcggtccttcaagaatctcctgtggcattttcccgatctggtcgcaaatcagggtcaaggaaaaagctagtccatcacttttgctgacatactcaacgcccggttcaagagcattatgtgcaagatggacttgcagtatgacgtggcgagctcttgttggaaaccgtgattgctgatggcactaatttctgacagatgatgatggtagaggtccaataacagatccttggcattaagcaccgcatttgtttgctccttgtatccggatttgccagacattaggaggaggagtgttttctcggggagctggtcacgggcagaatagtattgagataagctgcgcttcatatcatcaaaatcgcgcttcctcgggttcccgactctctcatatatacttttttttactttcaaagacccgaagactttccccatttgctttcatcttgctctctattgacgctttattccatgggacgagtatgtcccatgggaagcaaatgtcgtccaactagttagaatacagacgaggaagccggtgctagagtaataagagactgtaagtaatacgtataagaaaatatgtcattgaacttgggtttaattgatgggttgattgagattcttatacctgttgcaaccttatcaagtgcgtgatatactactccgttgtccttttttgatgaataataggtgaggtttagagggatagagtgcacgtgctgaagctcacgtgtcgcattttattgatgtagcttactcagtcagatgatgcttaatcagcttatgtaatgatctccgatcggatcagaactgttcagaggcgtgctcaattttacctgagatcaaagagcggcaagaggtgagcactaaaatggaaagggaaaggcattatccggtacatatattgcacaacatatgtacatatcgatgggctacctgacccttacaggttatgcaaatgtactcatatcatatgatatgattatgaaccatgtacggagtactttgggccttgaagatctgcctaatgaaagtccgggtgctttgaagtatagacataatttttagtgctggacattttagatggctgagatttgtctgcagctgccaaatatagttaccgaaggctttggtttagctactgtcctgtttctcatatatattgaattattttggactatacaatgaacttggaattcgttaaattctggttctgatttgacaaaataaatactggggatgtctagaggaagtattgttgtaatggcctgcaaaaccgtgagagatatatattccgtcgggaaagggatgttgacatcaaaagcgcgtaaaacgtagaaatgaggtgtgatcatgaaaccaccagctccaaaaagaaattcaacgcatataaaaaacaaacaattcagaaaacctaccaaaatgaatcaacaagctagcagagttaccccggcctcatagtatactctctaacattgaagcatcacgggatgatatgattagataagaacctcttatagtctaaacccctttaggactagtccgtcaaggctctacagaacattttttttcctgtccggatcaactgcgaaaccaccagcctaaacccccatttgtttcctaaggggcggaagaaaatagagtctcatcggaatccttgctgtttttatttgggcctggtctattgatatctatcttcacaccaccgcaccctcgactgcgagaaaaaaaaagaagataagaaaaaaagttacagccaagatgggaaagaagacgactcgcccatccaccaaggtcgcctcggccgccacatcgccggcatcgggcatgacatatgcgggcagcaagtcgtcgatcctgcgcgctgcgttctcaccatcagagtaccaattggccctgtttgcgtccgttatccaaggcctcgatggccagcacattcgcattcacgacacacagacaggacgcctccagtgtgagcatgccctggggccgaaggaaacagtgacctctttggactggggatactacggtggctcaggcaagggtcgtgaccagtcgaaaaagaagcgcaagcgcggttccgatgtcaatggggctgttgatggcctggaccagggggacattgtggttgcattcggcacaaacacatcggatatccgtatgtactcgccatccgaagataaggttgttggcaccttgaccggcgcgcatgacaagggtatcaaggacttcaagttcacggccgatcgacccgcccaggaggcttggagtatcggtggtgacaataagcttgtccagtgggacctgcgcaccggacaaagcacacagtaagtttgggatacttgctgggtaacaccgagctcctaactaatatacccgtaggacaatccacctcccctcatcctcagtcttcactgctctctcccgccccgtgccctcgaaccctcctcttatctgcgcttcccagaccccgtacttaatagataccgagaaggccgatgagccggttcagttcccggccatgcgcaaccctatccacaccgtcatttcgtcctcttccgagtctgctggtgtcggtgcattccttgcatctgatggtgaccgcttcatcaacgtctttgatgtcgcttcccagaagcttgttcgtaaccttgtcgccgaccaggaggtctcgtcgattacactgcaaacagatggcgctaccaccccggagaagcaagtgcttgctgcagttaccgcagatggcagcatcgaactcttcacaaagccatttgttcagccccaaagtgcgccctccgcgagtgccaaggctagccggaaacagatgacccaaaaagcaaacgcaaccctcaaaatcaccaacaccgagtcttcgaacgcctgcgttcctgtcgcagccatatcattccagggccctaacctcgtggttgcatacaccgagggtggtgtgatccctgtctttgagcgtgtcaagttcctcgacgaaaagaccgatgagctctctttcaccggaaccaagaccgtggtgaagaccaagtcaggctcagcactttcgtctgtcacaacgaatggagtcaagagtgcaggcgagacccgggttgacgaatctcgcatgaatgtcgagcagggtaacctggtcgatgatgatgtagagatggaggattcacgacaagacgcatccgactctggcagcgaggaggactccgatgacgacgacaacaagaagtccaaggcttcgaccgagaaaaagaccaagcccaccaagcaagtcgcagcgaacgaggacgtcgagatgcagaacgcatccgactccgaagaggaagaggaagaagagggcgcggagccatcgttcggcgaacttctacgcgcaaacgcaggccaggaagtcgacgtcgaggccgagcttgacgacgacgtcctcctgggcgcattggttcccggcaagccccaggccgtagtgcaacagatccctaccggcgtttcgctcgcaactgtcctcacacagtcgctcaagaccaacgacaacggaatgctcgagtcttgtttccacaccggtgacacctccatcatccgcactaccatccagcgcctcgactcttcgctggctgcgaccctgcttcaaaaactcgctgagcgcctcgcctcccggcctggtcgctacggccaccttctcgtctgggtgcagtggacctgcgtcgctcatggcggcgccctggctggtcatcctgatctcttgaagcgcatgacttccctctacaaggtcatggaccagcgctctgctaccctgccctcccttctgctcctcaagggcaagcttgacatgctcgatgcgcaattgggactgcggcaatcgatccgcggtggcgatgaaggcatggatagcgaggacgaggacaatgtcatctacgtcgagggccaagatgacctcgaggacagtgagactgaggccaagacaccgcggaagtcaatacgcgaccaggcttacgatgaagacgagtcaatgatgaacggcgtcgacgagtccgaagatgacgaggacgatggaagcgacgatgaggatgacgacgaagagcctatcttggacattgaggctgctgagtctgtcggttcttccgacgccgaggaatcgctggaggagaacgaggacgaggacgaagatgaggatagtgatggctcgatggttgacttcattgccgacacggaagacgacgagtccgacgatgctgctcagcagcagcccccgccatcaaagaagagcacgtcttctgcttccatcggcaagaagagcaagggcggcaggaaataagcgtgtctcttttgaagttgtacgaattagagatgggagaatggggtaacggcctataaaagaacatattttttattttttcccttcgatgcatccaaccgggtctgcatgtcattttttctttctttgttttatcttttgctttcgatatcttgtgcctctaccgagcgcctctgcgtctccatcaatgtctattgaatttcaccttggtatcttgaatatcgcttcttgtaaggaggtatacgataacccgtacagagcacttttctacacataaacacggtatttataccagcaactcctcaccccggcagggacctgcatgcaggacccgatgtctcggcactccttcctcaccgaggggaatcagcatggctgtcgtccgctcccgcgagggataggtagtgaagtgacccaacgcactgacattagcagtgtcgagagctagaatgactccattcttgccaccttcaatccaggcctcggtggtcgaattggggagcgtgatgtgcgctagaccggagaggtagaccacccatctagtgcggcattagctgattgcggactctataaaaacaaacaaacaaataataaaaaacatgtacaaatagcacatgtaactcattcagagtcattaatttgaaatagcgaaacaaacgcatgagggagaatatcactcactgcaacgcaggcgcattatgtctaccaccatcaaacccagccggcaacaccgcaaacgatgcgttgccaccgacatcccccaaattcaaggcggcggtgccaacctgcccgggttgagcggaagtttgaaatcccggcacgagagcccagcactctaaggtggagcgatggtggcgtgcgccgagaacggtcacgttgagagattgggcgaggattgccgagggaaagatgaattggatgagggtttgaagacgcattttgaggaaattaggagtgaattgtgtgagctagatgtaattgggaggaaaggaaatataaataagaagaagaagatctgggagctgatatatagttatggggggagccaaaagttagttttgtcgtagtggtccgatccttcgcccatgggagccgaagagaactgaacggcggtggagtggaatcagcgctcgcctatgagcggattggttcctaaaataagctagcactaatacagagagggcaatatattggaggaatcgtgtgtatgacatcgatgagagtacatagctactgtaggacagtgacgtcggatcgaaattaatgttaaacatactacggagtatacttagcagattggacggcagaaaacaagaaacaattcaattcatcgcaacaaagaatgataaacctacccaagttctgtcttgcagcattaaaccataaaaatataagcgcttaatgatagtgagagtaccccgtactcagacccaagaagacaaagaatactaacgaatgacttcaccaccagacttctcaatgccctcgaggccttcaagaatgtcgcttccaccgaagagtccacaagcagagtcagtgcttgttcttcttccggtccagatctcatggaatttcacggtttgatcactagacgcgacaataatgcatccctcctcccttgttcgtgtgcaccacatcccaccttctttttccttgggagtgaccatgctagcaccaaccctgcggctactgaccttgcggccacgggtcggggtctcttgttctggagacccagtctgggttgacgaggacgaaggtgaagatgactggctgtcaggccgagcagagcgtgtagccgagaaacgagggatttttcctggatatcgtactgcccacagtgctcttccgcagtcgaagttgctaactcgagtctcagggccatcccaggtggttccatagggcccccagggaatgacggccacctgtgcgcagctgggccaggcaaagacggcgattcgaaatgggtgatctggctgtgcataaccaaaagtagcggcgatctcgcgtcgagtcccgctccatataagactggttacctgcgcgaagacattgatggttgcgagacaagctccgctccgggtgtgatagaagtgtatagctttgtcattggtgcctccccccgtcgcgagcagggatgactgccatggcgcaaatgcaattgccttgaccgcagcggagtgcatcagacgatacttgtgacgaccgtatgggaccagaatagttcgtcccccaccggagatcacagtgcctgcatggtttaaaagcgcagattcggccggaggcttgactggagcagcaagccatgatgggagagcaggtcgtctaagaaacaatcgtcttcttgcggtgctcagaggaaagtatggaaatacaccgaggctgaagctgctaggagaatccgggggcgtgatgggtgggaccatataactcatctgctgtggcgaaacaatctcagccagctcaaagagaaggcaggcgttgtcattaccacccgtggcaaggtatttgtcatcgggtgaccatgccagtccacagatttgttgagtgtgtgcacagatcttggcaagaagcgtcatggacccgttccaattccacttagcttgatcttcttcgtcagaccactcgactgaatagtaccagatatttccaaagtcgtcacctgcaacaatctcttccacgtcgacttccatatgcatgaaccgttctgaaggtcgccgtgatgttctcggcttaaacgtcacacatgtaatggtactgggatgactgatctcaaaccggacttccttctcgaatgtgctccatagagacaactgacctgaccgcctggccactgcaagaatgcttcgctcgccatcctcagaagaaaatgacaaggaggtgacataatttgaggggtgcagatctggaaaggggggataatccatcccatgaccttcagaccagagatatacttgatgacctagacccacagcaagtatcccggatgttgttgagtatgcaagagtgctgcagtaaaaatcgtcccgaaggaaaggagcatcaaggattcgaaaaggcttcggtggaacaacctcttttctggtaggagataagggccctgagaatcgatccgagtcagttgatgccttggagaaggctgcggataccgccagtctcacaattccaaaagttgggttaagaatatcatatatgttttatctgtaaatggtaaatgtattccaaaagtaggctcagggggtggctgttgatgactacaattgcacttacaacgctccttttcaatttgcttccaagcactgtccttccattcaaatggggagaggcgctcgaagtctggagatgctggattgaggggggcatccagataccgcagacaagtagtacctagctgtctggtcgtcgggtcgattcccaaagcaagggcaagcctcgactcatgtatttcttgttcactgtacttgggttttctgggtaaaaaccgagccacgaagactggggcagatgatccattggtcgaagtgctcggcgtttcatgaggagccacgacaagggaactatcgaggactgcagatgctccacccacgttccagactgcgccggagctgacctgtctcaaagattcatgcgtagtgttgttgcctgtgatattgccttcagtgactagacgaggccgttgatgtgggatctgctggagtcgagttggcagctggggtctgttggcaacataagccctacgtgggattgtgggcagaaatggatcatcaccgggaggaagtcgtcgaagtagtctctcttgaggcgaaagacgctgcggatgcttggccacacgaaaggttgttgatgttggttcctcgaagtctcgctttggaatgaatctatcaggcgacataggacttcgaaagaaacttcttgctactgcatttccagtggttctcactctgctgcgacctcttttgggtgaggagacccggttttctttggaacgagggacgggtgtcagagcatgttgggtcttgggctttgacaatgatgattgagaagtaggtgtttcaaaaaatggcaaattgatagttgcaaattcagttaattggacaggtccactgtctctggaagactcggatcgagagtgcgaagtcaatggatgtttgtgactgcctgtagaggtttcctcgaaggagtgacgttgcatatctaccatggttctggatgcaggtcgataagttgtatatgattaatgacctagagctaaaaaaggaatgtataaggaggcctctctttcaaggcatagcggcaagatgagaaagacgacgaagcaaaagacaagtccccaaagtagaaagagtgatgatcacgtgaagctatgcagatgccggggagcttacgtaatttacccaccgcatcatccatggatgcaccaatgagataattctagttggccacatctgatcaacacaaagcaacctacctacaaggaaacaccttctatttatttcttattgtcaaacaaagagtgaaaatgcccagtgtgagataattcccgcatgctgtaccgttccgaggctgacgattgcgatagcatggtgtgccgcggtacaaaccagctgagaagtccgccgaggcgcgacagcaagagctgcagaagatagaaaaatacaaggatctcgagatttctgtatccaaaaaggttggccaccttttagagctcacctataaatggagtctgacctaggacaggtggctgagcatgagtacacaatcgagaccttgaacaagatctcggagctgctgtctagcaatccagaattctacacagcctggaactaccgccgtctggtactacagtatcagttctcccaagcagggggctcggataatgagactgctacccattcaatcacacagctaattataaatgatttacatttcctgattccccttctccggagcttccccaagtgctactggatctggaattatcgtttgtggctgttggatgaagctcgccgtctactaccccttcccgaggcccgggaaatctggcagcaagaacttgcccttgtgggtaagatgttgactctcgatagccggaatttccacgggtggggttatcgacgcttcgtggttgagactttgaaggagcttggcactgccgaggaagcaacaagcatgacccagaaggaatttgaatatgccacgaagatgattggagccaatctttccaacttctccgcgtggcattaccggacaaagcttatccaatcccttttggatgagcaatctgccagcgatgacgatcggagaagaatgttggacgatggttggtctaacctgtcttatcagagactatcttatactgatttttgtttttagaactatccctcattcatcaagcattcattgatccttatgatcagtcactttggttttatcaccaaaatctgatgagtgtgtttgacccgtcgatggctgaacgaactatggcccccaatttgagctcgtccgaccggctggagtacattagaaatgagatcgaagagatccaggagatgttggatggggctgaagactgcaaatatatctaccaggcattaattgagtgcacccttctcgcatccaaggtcgaaggcagcttgtcttctgaggatcgggaccagattctgagctggctctcagaagtgaagaaactggatccattgcgacgagaaagatggcttgattttgagaagaccttgtgaaaatatatgaataggtaacctaagcctgcggccctgtcgtgtctttttatttgtctttttttccggtattgtagtaccagcgtgttgctatctgcatgattttctggtctatgactctacggatcggcgactatctgctgtctgcattgtttaattcatagttgttttacttcatagattatgccacttgatggattgtttgctaaatagctaagcgagatgtttcgaggcttacaatgtttgcaaaaggtcagctatatcaataggctgctttccactttgaatttgtttcttctttccttctttgcaagaccaagcggccatgtggtataaaagcaccctgaagcagatcttccaccttcttctcctctgatgcccatggtgttctcctctctctaacaccctgctactctcagtgaacgaatttgctcccaccgtgtttcgcaggcagggctgtcggtgcccctgctgcccccgttgcagtcccctcttcaggattttcttaacgttcaccctaaatatatactacctgaggccactaatgatgcatcaggactatttgtgtatagagtttctttatacttacaggggtaagtatcaaattcgtagcatatgagtttgcgggctaggagtcctcttacctatcagcaccctccgatcgacctttaagattgcgaaactctatgatagcatagagaacatcacgtttactttaagggtctttcaggtaaaaaagttcaatatcacaatagtagaccgagtccagaaggtcttctaacgatatacacttcggaagatcacttgcaaaggtttaagcccgtttgcgtttactaaggaatgagtggttgggtgagggggtttcttatagaagtaagataccggggcgacttccagtaaaagcagactatagctatactgtagcgaactggacaaccatacttccattacgaaaaaacctcgaatggacctagtggtgccggtagagcatacagaagacatctatatctagagtattcttatccttcgttcgtcgggggatcttgcgctcgaccggaaagggaccctctagaaactatgctatcattagccttatctcctctatacagaaggtatgatcatactcgtcgcatctgtttgtgggcgtccttattgacacggcggtgggcaaatagctcgaaatactgataaaggcgtcgccagtactcatcataagactacagcctttcaattttttaatcctttcttttattccggtgagaataataacatcatcgtcatcatcatcatctcgcgtttggttctacgaggtcaactaatgctcccgtggtcaccttgcaagtcatgtgatctcagcctactacctcaccgccgccttctctgcaatggtgcaaccaatgattatagcattaatattatatctatcttttttgatgtcttttgtacaactttttaaaggatccttatatgtacaattgcagaggtagatgtaactaaattgagaatgagaggccacttctgcaaacagtgcaaacaaacaaacaaacaagcaaacaaacgatcaacgatatgtggagtcacatgactgacaatcatgcagatcgtatcgaccagatatgtgtgtcactatttctatgtacagttgtcttggccagagaaaattagacggggatctacagggaagaccggccacccttgtacggtagtctctaactgctggtatgccatatcagattgaatttgacctgacaaacatgccatgcaagtacaagtagaacacagacctaagtcgccaattgtatccgttaagcagtgtttgctgcatatagcagacgtcgagtgtctaacaatacgaaatcacaatgggatatacagctatttgaatgtggagatggtgactcgttggggcaccaatcagcgacgagtgtacctggtcggtcgaatcgatcacttgaaactcaccaaaccccttcaactccttcctcgttccatctttttcctttttcgcgaattccacttgcgatttttgtcttttagctcttccgagcgtctgctctcttgcgatcctatggggtgttctattttctgattgttgtgaggtcatctaaacagctatggccgatatgtcgacacctaaacaaagtcccgaatacgaaggggtaagtggttcagattcagatctctccaaaaccccagcttgtcttgacacgagcttatcgcccttcgaataggagtcttttgacgacgcccttgaaaccgtctcaatccaggagaacaacaacctcaacgtcatcatccccaagtccacttccacccgatcgttgaccgatagtccggcaattggctcacatatgtctccggaattgacggagaaacctccgtcaccttctgaatcgcaggccgagcagaagagcgagaccgccgaggagcaaatcagggatggcgaggggctggatggacagaatgataagaacaataagaatatggggaaggggcaagatgaaggaacgggtactagcgatgagaataatctcgacaccaaccacggggtgaacacagcgaccgatgagcccacccggggtgataagccggaacaagggtccgaggttacgcagacagaggtcgagaagaacggagaagatcacgatcagagcccactgcagaagtcgcctctactcacgtcccgccgtttatcaacatcatcatcgctcgacgaagtgaacctgatgaacagcaaggaagacgagtcgacacacaaggcacagcgcccaggggaccaaacagaaccgcctccgttgcctcctaagaacgatcccgctcctccggcaagtgcaggcctgatgggtctgtcgggtggcctgccctcagtcccatgggcggctcctccagtgaacaagaatccgcctattccccagccagcccatcctcggaagcctagtggcccctttgcgtggttcactcgaagctcaaccgcgactaatgctaaggacatcaaatccccacccccctctgccagccgacgaaacactgccacctccgtatcgaccctcagcagcaacctagaccatctcgctcgtgatggcgacgacgtctccagtatcggctcaaagaagccgagacgcaatagcctgaaggatcaattcaagatgctacgcctacgcgaggagagccatgcgccagaggtcgatcagacgagcgtgcaatcgggccaagccagcgttagccagtctggagctagcccccctatcatcccagaggaaggagaggatggcattttggtagcgtcaggagtcgtttcaccttcgaggacggtcggtcctgggagaacgggctctgtggctgatgcttccatccccgtggactgggagatgtggcagcaccttgtgaacaacgggcccaaggccttggcaagctcagaggaactgaatgccgccattaaacgaggtatcccgcagacgatccgaggagtgatttggcaaattttggcagattgccatactggcgatatggaggatatctatcgagacctcgtggcgcgtggcacagcacaagacaaagatggacgaacaataaatggcactgaaagttcgtcatcacgctcttcagtccgctcccacccctcgggttccggctcacggtccagcagcgctgcccctagcccgcctaacgaaggagaaacagataaattgtgcaaggaacatacctccaatgacgccgaccgtcttaagaaagcaaagatagacgccgttgcgctgcagaaattggagaagaccataaggcgagacctgggagctcgtactagctacgcgaaatactttgtttcccaaggcagccaagaaggcctctttgggctgtgcaaggcatacgccctgtatgatccgggagttggatacgcgcaaggcatgaattttattgtcatgccattgttattcaacgtgagtataccctcaattaggttgactgagcttatgggctgacgttttacacagatggacgaagtcgatgctttcgccatgatggtcaagctgatgaacaagtactctctgcgagatatgttcattcaggatatgcctgggcttcaccgtagcctataccaattcgagcgactgctagaagacctagaacctgctctctactgccatctccggcgccgtggagttcctcctcagctgtacgccacccagtggttcttgacgctgttcgcctaccgtttcccgctgcaactggtccttcgtatctacgacctgatattcgaagagggactagaaaccaccatcctcaaattcggcgttgcgatcatgcgacgaaacgcagacgcgctgcttgaaatgaaagatatgagtatgctcactactttcttgaaagagcgtttgttcgatgcctacattgacaagcagccatccacctcgtcaatcctagagtcgggcttcttcggaagctctggtgcctctgataaagagatttaccgatccgacatcatggtacaggacgcttgcgccattcctctcacgtccgagatgctcaccgcgtacaccgccgaatgggaggaaaagaccaaaaccgagaaagagcgtgaagtcgagctggagcacttgcggcacaccgtgatcacgcagggcgcacgtgtccgacttctcgaggaacgtgccgaagcatcagacaaggagcatgtgcaattggcttccgagctggtgcacgtgaaggtcgagaatgaggagctgcgcgacctcaaggatgcgctggaactccaggtcggccaacttaagaacgtggtcgacaagcagccggctgaagtggaggagaagctccgcgcagaaatggagcggatcatgaagcggaacatcgaggtgcaaaacgagaaccgtgcgatggaagaatcaatgtccgatatggagaaggagttggttgccacgaaaatgaagtgggcagaggtaagatattttatcattcagcgtgagatgccgagactgacgagctcaaacagatttccgaaaatcacgagaatctccgccagaaatggagcgacctgcgtcgtgccctcgactgattgtcacaacgttgcttctattagtactccacccggatagcaatattcggttctgtatatttggaatgcgcagatgtggtagcgaggatctgcgatcacgtcctatcctgcgcatttgcaccatgcttatgggccgggtcaattacttttgtcctgatttgctccctgtacctgcttttctccgttttgagccgacatcatgatttgcccctttacgactcttttctccaagctctcagcatgccatttttggaaggcatcggtgtttcgctaccttgtgttgaattatatttgctctagtgtgtatgtctatctccgatcctcgggcagggcgtactagacgtatgcatgtacatcatcaatggactttgttcatcctattatctagcttccgcatgtggccagctctctaccttagctctatactctctttatacgaagatcgaacatgcacaaatccatctctcgattctgactccattacagaatattctcatagtaactcgtcaacacatcctccttgacaggcgccgcacaagccttgagagccttgtgcgcctcacactcggtatcataatacttcatatcctccatcgaagcaaaagtcgtcttgacagacaagttgtaccccttattacgaggatcagggatcgaagcgccaacagcagcagcgaggatgtagggtttgccgtcctacaaacagaaaaagaaaacacccgttaataaccgttcaattgcgtttcattccgaatctcccgaatgacgactacgtggtacagcaagcatagtacagcatagtacatgtagccaaacagcgcagacaatgtagaaaagaacaagatgcactcacctttgtagcggtcttcgcgaggaccttgtactgctccagcacgcggtcgcgatccgcctcgttggggatcttgaagagggtgattcgctcgataggggccattgtttttttgagggtgtgggaggtgaggagtcgggaaatggacatggatttcagattctgggggaattaatatgaatttatacgggtttatatggcggggttacgatgggttcatatatgtcattgtttctgatacttccgtcgggttgtggggaggagccggagtagatccgttgattcatggtttgttaattatttccgctatttttgactaggttggtattgtttttgattgttttgtatcttctgtatattctagatgtctctctcttcaattgagagtttctttgctggggaaatagggcggaatattcttggttggagagcgcgcaatttccgctcgggtatttggtgtgcggaattggatattgaaggatgatgggattgtatttgtatatgcgtatcggatggatattgaggggcctcggtatattatttgtacaccattgccatgctgtggaacaaactacgcaagacatctgtatggcttactatatggcgcactagaggcatagggcatcgaccgaggaacttattagcttcactttataatacccggaagattgactagagtcctagattggatatgacatggtccatcgtatcaaacattcgctgggcactggtcacagattcccacgcaaagcctgttccctttcaaaggcctcgaacaaactcttgaaattcccagccccaaacccatcaaaggaattccgttgtatgacctctatgaacaccgtcggcctatccccgacatgcttggagaagatctgaagcaggtacccgcgctcgtcgaaatcaaccaagatattcagctgctcgagtacgtctacatcggccccaagcgtccaggacacttgtgtcaggcgcttccgcaaatccgcgtagtatgtagctggtacactgaggaactggacaccgcgcgcttggagactagttacggcagcgacgatgtcgtgcgtgcggaaggctatgtgttggactccggcgccgtggtagtagtcgacgaatctgcgaatgttagaagtgctggtatgtgggtggcgtagggcagacgagaaagaagaaagaaaaaaaaacagggacaagttgcgtactcttcaatctgtgatttcttcttgccggttgcgggctcgttcataggcatcttgatggtttcgtttggtgaagcgatgacaattgatcgcatcgctgagtactcgctgcacatgtctttatcgtcgacggtccagtagcgatggaagtcgaggcattcctcataactaaagctggttagcgacagtcaaacaagaaccacattaattctactcactattggacaatgctgtccactcctccccacgactgattcccgacacagtggtcaatctcaagaaggttgatgggtggcaaaagctgtgtgatcggatcttcgctatcgagcaatcgatacccaggcaagaagggagcacctgccgaatacctctcccgattcaccagagtatgtacggtatccccgtacgtcccaacagtcgcagagacgatcgatccatgcccctcgacagaaaacgtccgcggctcagtgatagcgcgagcaccgttccctatagcccggttccatacagcttgtatatctcctgcgatccggaatgcgacatccttcaccccgtcgccgtgtatggtcaagtgcttatggatctcagccagcatcgcccgctcataaatcgaagcctggcgcaagataccgtcttccgggtcttggttcggtgggccacaaactggccccgtaagaacaaaagtagcgtcgctgttggctacaacatagctcacaaggtagggcgagccgttttctgggccgcggtatgcaacggggcggaagcccatgcgagtaatccagtatgtggcagcttgtttggggttgccgacgtaccaatggatgtgatcgaagccgacatattcggggcccatcttggcgggaaagatgtcttcattttccgggacggtcatgatcggtgctgttgattgtggctgcgctaatatcggtgcaggtgtggaccgagaaacatgtcatccctacgccagccgttgagccggtgtaaggcggggacaagttatttatgagtgattttgaaaacagctgggtcggtgttgaggagaaaaatagaattctggcgaggaaatccctgcccagacgtgtcacattccaagcccgcgtctccggatcgagaggctatctaagataaacgtatgaggcaatgctgaagtcatccattaccagagctttgtccttctttggtgaaccttggggggttcaagttcaggcttgtatacccacagaagccgaagtgatgtttttgcacaaggtcaatgctgtagaaagaagccgctgttctccgtagcaaagcgcgaggccatgtcagttgggctggctgtgcatgtcgcaaccctttcatccaagtcctgcggctgtatgtgttgtacacaacatatgccatttccagatcccatctcgctagtttatctcattccaaggcgaaagtaaaatccccaaatcagcccaatcaaacagttgtcacgggctccggccgactcttgaagaaaatcttataccgcacaatctccacaacctccagttcctcgctctccgccgcctgtcgtctctgtagcacggcaatcggccgcggcagcttcttgacttcgccagtcatccgctggtaccgaccgacatacatgtaagcgcgcttcatccattttgtgtcatctgggttgtgaaccgaatagtctgggaacatgagttttccgatcggagtttcgaaggtggaggctggattatccgtagaggtagagtagtctatgtcatcttcgtcccccgaggggacattgattgtgccctgtagctcgagaagggctaggcccgagggtgtttgaaggagtgctggaaggggattattcggtgttgaggcagtcgtagtcctttttgctgagccagagcagcgtggttgtagctttatggagggcataatgtagtcttgatgtttcaattggagttgaaggaggaaaacgcgaacgcggcacgcgtttgggatttccccacttcttatcgcgagaaatgggtaattatgggattacaagcacggaatataactatgatcacatatattatttgtaatactgatgcttgggataagagtacgtacatgacttgagtacatcaataactagaccattgtgtttgttctcatgtcatatcaggtaaacgcatagtctttgtctaaagcccgtccaggaatcaagagttatatcgtagtagaagtaacaatgaggtagctttgctacaaatcttgggcttaagtgtggctccaaactaatcgacaggagctttagtgtaatataagcattcttccgaggccatggccaagatttcgacatgtaaataagagtggaatgtaatagatggcctttcaagagaacaattttcgtgtgattgccacgaagcgcaattagctcgaccctataacatagctctggaggcagaaagtggtgaaatacaggaagcgttcagcaaacatagagcttgatacctgtatgaactgccagacaactctcggaattaggattcagacaggaaagcgcccgtggtattttgcattgtatctgtatatgatttatattagtcgaggtatttttattgacattgagaccataccaacagttcaggggtattcaaataacaaatgggcacaatacacaatgcataatgagcagaagcatacctctcaagaagcgctattcttatagcaaacatcctcaaggttctgcaggcccttaatagcctccccagctatatcttcggcagtcctaggaccctgtaatttgccgtaacggagatcgctcatatcaccaacagtcgtattgagctgagctaaaatctttgcagcctcttgatcgatcccagcaatttcacgctcgacattagcgctggccgtctccatttcagccaggagactagctactgagtgataatttcccggtacagcagtaggtggttggccaaacagatgaacatccatgtccatttcacgctcttcggaacttgaggcttcgactccagtggctagaatggcttttcggagctccgctctttgcgtttcaccttgcttgatctcgttgtcgatgttttcattgactcgatccatgtcctgttctcggacctgttgcagctcccgatacaaagtcctgatgtgtggatgggatctcaagcgctttgggaagagctctgtgaacttttgcagcgagatgactgttggtagcggggctggagagagcaggaaattgctcaggatggactcctcagagggaggcatgatgaatgtgtatagtgtagtacacacaatatgcagagtatagtgttctcttcttctcacaactgtggtgtagttttgtctcccgtttgacgcgaaccggaagttgaaaatattcacgtgaacaaaagaatatgaaaatgaatagaagaatggaaatctattcctattgttatggaatagtggaataaacagacgaatagacgaatcgttgtcaatgtcaaggtgacaataagctgccgcgcttaatttcttccaaggggccactcctcttcgcttgttttccttcttcttcttccactctacttcgtctacctcgtctacatctacatcaacttgcctcaaccccattctctcttcctaaaatcttgactctctctactattcctgagctggtctcgagtctgatctattcttgttccttcttacaccttcttctactttgctgaatcggatttgctgtcaagaacaacttgtactgccatttgtgcatcttcctttcttcctgtttttgctcaagtctgcatctagctgcggtgttccaattgaagtctctgaaggcttccaaggattttctgatcgtggctgttaccgcctgtatcatacctttccctgcgagacaggaatcatcttgacatctctacacctttgagctcaaaggtctacaatctgtcatacaagcttcgacaagcacgtcttctacctttctctgacaaaatggctccgatttctatgtatagcaaagacgagaaggtcctttgcttccaccatgagatcctttacgatgccaagatcctggatgttcgccacaaggactccactgacaagaagagcccctttgaatatcaagtccactacaagggctggaagaatacgtaagtctggcttgtttcatttcttcccctgtttatctacgtcctggcggtgtcaagatcgttcccctccaaaaccttggaaagtttgtccgggccaatacggaagacttgaactcgactttgagctatgcacactctctgttatgcagaattgcgtcttgttttctgccgcacatgtttcagaaaagaatatatccatcattcgatttcgtggaacattctaacattggaacagctgggatgactgggtcctggaggaccgtcttcgcaagcacaccgaagacaaccgcgaattggccagcaatctgcgtcgggaagctgaagcttcattccgtctaaagaacaccaagatcactgctaagaagcgtgcgggttccgaccgtgactctgtgcgggacagcgaggagcgcggctccgtgcccagccgtggcaccaaacgagcccgtgatagtgaaatcgaaaaggtatgcaattaacacatcaaatcgggtgcaatggaaccaaacccaagaaaataaaatacaaaaggaccgtattatttatgatcccatactaacaatcttcaggaggagagcttcaatatccgcccctctgtgcgcatcgtcatgccagacaatttgaagtccctacttgtcgatgactgggagcaggtaaccaagaaccagtgcgtcgtctctttgccggcgaagtacccagtccgccagatcctgcaagactggcacgaggaagagctcccaaagcggtcgggctcgtcggcagacgaggacgtgctggaggaagtggtcgccgggatccaggagtacttcgacaagtgtctggataagattcttctctaccgccacgagcgcccccagtaccgtggcctgcgtaagaagttcgaggccgctaccggggaactggccgataagggccccatcgatgtatacggggcggagcacctgatccgcttgttcagtatgtactcaccttacttctgcttcaactgtgagagttgggaatcgtactaaccgttgcgtgtgtaggcactatgcctgagttgattgctcagaccaacatggacatgcaggctacgaatcgcctgcgagaggagatctcgaagctgtccatgtggttgagcaagaactccgagaagtacttcgctaccagctaccagccggcggagagcactcactgagtgcgagaagaagcttctcttgggggaggaaaggggcttctgccccttttctgtgttgtatgcgttggggtgagggtggccacccttccagcagcagcttgtttttttttttaagattttcgaagaagcgcgggcctgaatagacctggaatacaagagactttgcttagctatatcttaatctccaagaagacgtaggttctcatgagattggagttacgatctgtactagtagttgtgagatcaaaccctgacatcttgatgctactactcggtagttattacagaagcaaggcaataatgagtcgatgctgagataagagaaaatatgaattttcaactggatttcttaatagaaaactcaatgataccactacctagtgatctatcaccgacaaaactcttgaattcagatcaacatccaagatccacaaaattagaaggagaaggaaatgaacaatccaacaatctaatctgatatctaagcaaccagttgccttgcatcatcaacagcccaccgcgccgcacgcttcaattcactcttccactccgcctcacgccacttagcccaagcattcaaaccctcaggcggctggatactcagcgtatcatagccctgcttaattatacggtggacctcacgcggggagagattcttcttcctgatcgacggcaacgccaccggcacaggctcatcgcctttgggactggcagccgccgccgccgccgccgcagcagcagcaacagcagcggagtctgcaccctccgaatggaagagcagggtgtagaaatgcgtagatactgagaggagggtgtcgatggctgctgaatgcagctcgttgggttgagagattgcatcggctgcgattgcggtattggagcgggacagtgagtatgcatcgcggaatttggagataatggggcctgtctcgacaagcttatagaagaggtcatcgtaggaggctgggtctgggaggaaggtgtcgccgcctgagacgcagaacgcgattaggtctgcgagggaggttgtgagggtttggattttggggctgctggttaaatcggaggcgtaggttgttaggaagcgcatgagggagagcagagtccgccagagctcggaccagtggtaggcgaggcggatcttgttctttgagaggtaggttaggaggcggagagtgattgcgattgtgtggctgggaggcttgttaggaatggctaatggatacagtggatggttgtttcgtacctgtaaatgttgacgtcgaggcgccggcgaaggttatgcgtaatagtatcgatggcaatatcaaatatgacggttgcgaggacccgctctccgctgactagagggagatagggctgtttctgtcgacagatgcgtacctttcgcttgacttcctcgctgcaaatttgcttgcagatgatcgggtcttcgaccagaatgcgaagtgtgaataggtttagttcggcatagtgcccgacccgcggggatcgatatgcatgttgaagaagataggaggacaatgataggaagctcgaaaaaggggcttctccatcgctggtttctggtcccagatgaaccaaatgataaccaaagagcttattggcgtttgtgaagtcgtacgtggccattagaattgcggcttcatgtgccggactgccaggattgtaagtttcgaatcaagattctccgtgcagagaacttacagatcagcgaacatggccttcgcttcttccgccgaaggtgggttcgctctatccctggcgcccggtgcgagcgctcgtagtccaaaaaagattaacgtgttggtgaagctccagccctctggaatatcatcctggacagcaatatagccattccgcaggcgattacaggccagaccgacacccttggcaactttttcaatgcttgactcgttcacaaaatcatcaagccgaagctggtaggggttttggaattcaaacttgttgtagttggccaatagccccagaaggaggaatggatcgaacacttgcagcggggtatcagaatcagaaacatactattagcgactgtcagttattttcatatataaacaatatgagtaactcaaaccttcatgagcgacgggaaaaggtccctgtgtgtaagataggagaccaggctagttttgtatgctccactagtcatggcaatggccgtcttgatagctttgagccgcacatcgactggaaaaattaggatcaactgatatgatctcggttaagagcagaacaagcaatgacttacagctactgccattgcgaatgattctgtccaaaacggccacgaactcggaaatgacatggtccacttcgtcgagtcctgcaagaacagtgatgacatccgaacttgggtttgtgtatttcttgctcaaaatgctcgtcaagaaaacagtcaaggtctgtgaaacaaggttagacaatatgtgccggatattgatcacggggttcttacatctaatgcataagaatccgacggggcaaccccagctgctgcctcgcgagtggcacggacaaagaaacgccgagtttgaatctaggggttgtatcagctatttgattattgtcttgggcgctttttgtatcatggcttacctgtagaccaatagtatcgtctgggctcaaatggtctaggatagcatgtagttgtttccggtctggaggcagcaagaaaaattctctccaaaagccctccgaggggtctgcatcatctgctacctattaggagtattgttagcaatatttcataaagcgatgttcatacccgtactttgaagagattctcatagagctggacaatcttaggtttaaaggactcgggtctactctgctgggtaaggggtgaggcgtccatgatattagacaggatgatctgcaacgttaggtcgccagcattggacctcgagaaccaaaagagtaaggttaatataaagtcgagttgattccaattgcttcgaggttcataaaaagggacaccagccactttgtcagccgatccagccacatgtcctctacacttggcaatgtgtttacgcattgggagaaaatgaacaaattccagtatattcgtgaattaacctagtggatctatacagttcataaactttacatcttgatccttttccccgctactcagctacatttagaggtgtgggtggcatcttcatgagagagccatgtctctccgaggaacggaatgctccgcggtgtgggatgactcagcttccgaaaaacgcattggatgacaacattggaaatccaaagcagatcgcagttggaacttgtcattctaccttggtagctggattaaatagggcaaagacgaatcagctcggctcctaagtcagcctcttctcctgattagtctataattagcaaatcaactgaaactcgagcaatggcgccactgctgcactgctgttgtgtagaaaccactcgacgctgattggctgggtttgcgtcatgcaacgatcttatgtaatccacttgccatgggggaatcctcaaaacagtcagagattcttctcaactttattactcaatcctccattccaccatttttctcacacaacatcctatgatccaatagcaatttcgtcgaggttcactcccattttacattgattgcccctcgactatgagcttctctaccaccatgcaacgtccagtgacatcatccgccacactcctccgatgggtaaagccctcggcaggacgtctgcgtactttctcctcatatggaaacgcttacctagcctccaagcgggatatgcaaaccgcaactgcctaccgtcctcactcgctcccctcctcattcccgcctcctcgaagcaccggcggcgccgacacttccatttcagctgaattcccttccgacatgaaatcataccgcaacacatcacaaggcacattgtccaatgtgagcctacgggaaggcgaggcgcaaaaatccaagccgacttccgcttctccgcccgcctccaagacttccccgaaaccccgtcggccgctccggccaagaaaggccgccatgaaattgtccacattggccatcgagcagcttcgcaagttgatggcacagccggagcccaagtatattcgagtcggtgtcaagaaccgtggctgctcgggtctcgcctatcacctggagtacgtggagaagccgggaaagttcgatgaggtagtcgagcaggacggcgtcaaggtcctcatcgacagcaaggctttgttcagtattatcggcagcgaaatggactggcaagaggacaagctgagcagacgattcattttccgcaaccccaacatcagtaagtggcccctgcaagaattacagcatcctctatagattcgatttactgactcacgattacagaggaagaatgtggctgcggcgagtctttcatggtttaagcacacggcttgatcattccttttgatatgtttcttatacaggacctcttggcgtctttcttctcggtgcatcggacggcgttttcaaagggggtctgggattccacgaccaccctcttgtttgagtatatacgcttgatatccagttgataccttttatccactttctttctgcattttctactgcgtctcgtggtcactgtgggctcacaagtggcgagccatgtcaagagacaggctagaggctcaaccaacgaggtgctggcttttctttctctgcggagacattcttttgaaccctcgcaagatcaaccatgtgatatatttgtgtatagattagtccgaaggacattgatgacgacatatgacatatatttagctcaaaaaaatcaaaaaaatcaccataaacatgttttctcgataatctattcttttctccttcctattagcttcctattagcctctcagtatagtagaaaagtcatagtatacggttactgtctagaatgcgtcacctgactggatataagccgaggccccggaatgggctgagcgccgcatctcatacataccagtcattgcttgtatagagcggtctcaatccattccacatgagagcataggattaactgttacctaaaacatgacctcacccttcctctctccatacgcagtcggcgaaccagacaccgagccgctcctcatcaccgtccgcttctccgcctcaatccccgacctccaactagacgtcccagagcccgagaccacaacaggcgcaggtctaaagcaactaatccgagcgcaactcgccaaacccctgtcatcccaccgactacgcctcatctacgccggccgcggtctcgaagacacagccgcattaacagcctcactaaagctcccttcgtcaccaagccggagccctcgccccgtagcagaccaacccgagacaccagaagaaaatggcaaaggaaagcaggcggtgcgcgatacccgcccacgaatttacatccactgctcgatcggcgacatcgtactctcagacgcagacttagctagcgaagcaagcgtgtcatcaacgatccttctgcaacagaagcaacagaaaactaacacaggaaagaaacttttcggcaaggatgtctcgacatctcgtcactcccagacccagacccagacccagacccagtcccagtcaactaccaccacacccgcaccccgcggtttcgaccgcctcctctcggccggcttcacggcggctgaggtcaccgctctgcgctcccagttcctggccatgcagtctgtttcccggacgccggatactatgcctactggcgaccagttgcgggatcttgaggaccgctggatggatgaggggtcgacggcggcgcaggtgcagggtgggtttggggaggggggtggtatcggggatgacgagggcgggattggatctggatcgcgtggggcgatggatgatatgctttggggcgctgttatggggttcttttggcctgttggttgtgcgatgtggttgcgcagagaggaaggggtgtggagttggaggaagggggtggctgtttgtgtgggtgttattgttaatgctgtttttggggcgatgaggattatgaactgagggtgttgatatgtatatgtatatatcattctttcttcttatttggcgttatgagatacccccaattgaagccatttggtacattctaattgatacgtgagatttgtctaggctattaatcattgtattagagaccgggattgcttggactaaggatttgggtctagctgtgtaaagactcgccgatgctatcatactgtatacataatggcaaatatatgagagacagagacggacagacagacaggcaatagccttgctagtaagagcaggaaataaaaggatatgagagatcagaccgagtatacaaacgccagcgcgaaactcaagtactaatggaacttgctgaaaatgacagcgaaaatcaaaagaaccagaaccgtaataatcgcaatagtgatcatccgattggtagccatcctaaacaacacacaagaggtcagcaatcacgtctatatatagaagaacaagacaaaaggggagtcagtacctacgggccatgcccctcaaagtcttgatactagtatcaacgtaaccctcactctgctgcaagttgttccgagcattcgtgatctgctccctctgctcgtacagtgtgccgagcgtgccgcgagcaacatcctcggtctccagggccatgcgctgactctgctgcagccgtgccgaactgcgctctagccggtccgtaccggacagcaactgctgtctttgttcgaggtgctcatcctgcggctcgtcggtgtatcggtcgccgaatagtgcttgccggtcatccgagagggacttgagcttgcgcttgacctcgtcgatatcggttgagtagttgcggaagcggatgttgacttttgaccgggctgcggaggggatgttctgcttctccatgcgcatttggtcgagctagatggggtttgatcgggttagtttgttctgttcttgtgtttgttcgttgttctcgcattgcggcgcatgaaaaccgggtgaggggttcggtggactcaccagttctgttgcttcttcgaggacttgcgttgcgttgccgattgctgatttccgttgctcgccgcttgcctcggcgatctggtccagcttctggttcagatcggcttgcaccagcttcaactcgttctcgtagctggcgaacatctccgagccggcatctgtgttcaggtttgacatcgtgattgtatagtatgtattctagcttaggtgggagagaagatctgctgtctgcaacggtagttgatgtgttgatgtaggctccacctttatctggggcgggtgacactgttcaacagctgagtggcggtcaacggatcttgttagtgtggcttcgctttgcaaccgatatagactgtttttttgggagttcttagggagcacaaagagaaaatatcgaaataaccaaaggtgctaggataagactggaacgtgacggtgagacacgtgattaatctaagtcgggttgcatttgcgacatgcagatgacatctatataactagtactctatttaaacctacaaccatttatcttttagatgctgcaataaaccggaaacataatttgatacatagcattagagtaacaccaggcccatacaaaacaattcgccttttcaataaacatcaaagatacccctttggtatacaagatcatggaactttctcaagccttctagccatttataacaggaaattcttgctatcttgatcaacaatgattgcgctacgcttggcatccaggaagagatcctcgcactccgcaatatcggcctcctcaattgcgccggggcggccattgacacgcgagagaatgcttgcgggggtcaacagctgcagggcataccgcaagctgaccttgcttccatggtcagcgaccttgttcaaggcaggctctgtgatattgaggccttcaatcttggcgcgcagccggatgatagtcttgatctcctcgggggcgtaggggttggtggggatgataagaaggcgggcaagcagatcaggtgggataccgtgtgcggcactgatttcagtaccgcgaataacggcgtggccacggttggaagcgaggatgacaatcggggagatggtcgattcgagggcgcggttcagatatgtgaagcactcaatgtcgagcatgtgcacctagacgaagaaacgaagtcagagacatgatccaataattgacagcataaactttctccacgtacctcatcgatgaagagaacaccgggaaccaactctgcgacaccctgatcaatgtacctgttgacaaccttgttgatttcctggcgcaacttgtccgtgatttccgtcttcttgggcttcatcagctggcccatcatactcatcacgtcttgtccgccctggggtcgggcgttggccatatccaggtcgtgaagggtcacatcctgaacaatctccttcttcttgtgaacctcacccttggggacaggcacatactcctcagcctcaagatcgaattcggtagcataggcatcggatcgcccgactcgcttgcatgagccggtgttggcttcaatgtagatgacatctccgaccgtgacacgctctttctggatggcttcgtagatgctggggtccaggcgcagcttcttggagcccttagcggacttcaatccgatgatcaggtggctaattgtgcgcccgtatccgcccagtgggttctcagcctcctcgggggtaagctctgtcacctctccctcataaacttcctttgtttcgcgaacacggaggcctgtcatgcgttagcttaattttctagcttgtggcgtttttccctgatgtcgtattgcgtaccaatagctctccggaagttctccatcagtgcttcagtcttcttgacctcagcggaatagatttcactgccaacaatagggcagaaaggaaccttagttcctagctcctgcgatacagcaagagcaagagcagtttttccggtaccagggccaccagcaagcagcacagctcgtccagccatcttctttgacttgatcaagtccaccacaacaccgcatgcctgccgatggtttaaaccgttagttatcgttactgcgaaccagataccctggattcagtgttgctatccactcacctcacgggcagctccttgtcccacgaatccatccgcattgtgctccggggtcccatcagagcgtaagcctagaccccgaatgtgtgtatgcgctgcggttctgttctcgcgcgagttccccttcacttcactaatctggaccatgtttgggagagatgtggccgagtagagccacgggtattgacgagagatgggtcaatcggttgaaaagaaggaagtagtaataaatcaaagcttcaaagaaatagcctagatcgaaaagaaaggtaacgcgatggttctctgtgagataatgcttctggccgaaattcgcgagcaagggatcggcgaatgagaacgccgccctcaaggcggtgaactgccccaaattcttccctactggacctcttcctccgcctgttgtctactaacgactttccggctttttgtgttctcgacactctgcgagggtccaatagctgtcaaacacaatggcaggcctacacgcaagatccgcaatggccgcccccttctctttggcctcggccttccgcagtctttccatcgccacaccgaagcgatccttctcaacgacgccggcaacgcaatcagttccgaaactaccggaaaccgccccagtctacccctacggagaatccaagtggtacaagcaggctgactccggtctctatggaggcgcttcgatccgattcggcaacaagatctctaagggacgcaatgcaggcaagacacgacgaacctggaagcctaacgtccgccgaaagaagatcgagagcgaggctctgggcgagtcagtgtttatcaaggtcactcgtcgcgccttgcgatcaatatacaaggccaagggcctagacaactatttgctgtctgatcggccaacacgcctcaaggagctcggtcctttcggatggaaccttcgacaccagattatgcaaacaccggcgatcaaggagagatttgataagcagcgtaaggccttcggtattcctgagcccccgacattgagcaaatggatgagggaccacaggctggagatcaggaacaaaatcgaaaacctggacattgacgccatgaccaagcctcgcgtctctccgcgaagcagccagtcgtatgctcgctagaacagcttgagcgaccttgcgtgccgagggaaatgaacaggcgcttgtaccactatcctgaagatcgatggacggttttttgggcaccgcggattttgtgccatctttgtacgctatctcgtttcttgtggtagaaatgatggccacaaatttctaatttgggtgcggtctctttttcaatttgcgtattgggtcttctgtgtattatactccaatctcactgcgtgttcacttatcaagacgtttcattcaactccatctttacgccgagtctataacaacaagtatgtataaacggaatatagcattccggtcaaaatcaaaattccgccgatccaaagaggagtggatacatgagtgtatcgtcgtcagcctccaaagcactgccaatcccgttctcaagggtagaaaaggcctggacatgcatgccagccatcgacctagcatgatttgattcacggaaaaaacggatactcttcggagcgcatgtgactatgcaaaccacccagcattatttggtcatgcgatgccatcatgcgcaagacaccccgatgcatgatgaccgacgtcagcaaaggcatctgagattggatgtgggaagcagactccgccgagatgtgcctccgttccgtagactcgaattcttttggctagaacatcgaaggcatcacgtaaaggttcggcttgaacccatcgctcggcgaggataaccagcgcagttgagcaggcgcgtaatgcttctgggacttctcgtgaccggtaggcaatggttcaatgctaaggtggagttgtcagaagcagtatagaagggtgatacctacggcgacttggctcaagagctaattaccagactaggtcggttgatagggaaaataatcgagggttaccagcacataccccaggtcataattgtgctgtttgtcggtctttttggaaagtccttgccatagcaatctatattgtacaggctgagactggctggtgaggatcgtgaagttataagccatgccaacccatcgatcgctcgtgtagcgttttggggcaacatcgctcaatagccgtaattgagacctctaggagtccagttcacccaacatatgttctcgccatgtcgttgaggagatttatttgaaatttgtaagcgtgcaaagcttggggaagatcgatatgtgtattcgtctagctagttccatagagaaggtaccccaaggccatatgaccgtcgagacgacggtaacatctgccgtgccaggaaggatttgattgattgtcagcaatgattagatttcaaagccaagtatgcaatttcaccattgccaatcgcgttcctggtaccaatccgtgttacgaggtcggaccagtccgtacaagacgtagttaaaatcggaccagttctcgttgctatcgatagagagacccattcaaaagcccgaaatatgcctagagatatagaataagtaaattcacttttagcctattagataccacgcggataaagaatatcacgtgcatctttccggtcgacttatcatagataagcttgctttcgtgaggggaaattggctgaataccgcatgatacaagctctcttatggatatgttagctttataagttcaatgaagatagagaatgaacttactggtagactcgacggaactctttacgcatagcgtcgcggacttcaggcgtctgcctccagatatacagcttagatagcggtacccctggaactttctcccagataatataggtaatgaagcctgagggaataatgtcgtctgattcttactatgcttcttggtagctaagaagcttaaaaataacctcacagcccttctatatgagttccttcagtatatctcactcattcgtagtttgtgttatagtctgctttacttaaatacttgacttcgagatctgggtcccagtaatagggatctgctggtagattcgcacaaatgctggcctctgagctgggttatctttacggtagcaaagaaatttagcggcaacatatagatacctaaagcctttttcgatgtcatgctggtcttcgggataagaaatttcattcagcttcgcggtgattacccatgtcacagacggcagcagaaggtttgtttgtcttagcgtcagtggtgatctcggtgcctacaaggtcacccatcaaatcagtttcagcggtatccatgttggacctgtagatttccttgataggggcataggctaggggtaaaatggttgaggagagaaaagaggagagactcgagaggtatggtcctggatggatgcagggagtaactgtagccttggaggtgtaatctatgagtaatctatttggtaaacggtgacgggtctttccgccgacaggaaaactaaataaaacacatattagaaactattctaatcattcaagccagacattattgagataaccaagttgttgcatcatcttaccgtttactagaatcaaaagcggtatataaagtagggctggcagaactacccgcaagcggtaagagaaatacaagcgcagaagaggaaccagagatgctgagaggggtaataattatttatttcgagtccttttgaccttcgcttttgtaatattttacctcggcaaggaagacaacactataatgcctcagaaaattaccgtggctgtggcacaagcccgcactctgtctactctcgagttgaccctcgcttctctcaaggaaaccacccagcatgcagcttcaaagggcgtccatcttatactcttcccagaagcctacctaggcggatatcctcgcacttgtgactttggaactgctgttggcgcgcgtgctccctacgggcgggatcaatttcttgagtacttccgtgctgccgttgacctgggcgatacgcctgctggagcgggagatgactgggtggagcgtaagctacccgtggcccaaggtcgagaccaccgtggtgatggaacaagagagttcctcgagcggctatcccgcgagacgggcgtctttattgcaactgggttgattgaaaaggccggggggagcttgtactgctctgcgctgtatgtcgatcctttgaggggtgttctggggaaaagacgaaaggtcatgccggtaagtacatgcaaatcaatttttgctgtcatttatagtcaaattggaagatatagactaatgctgacttgaaattgccggaaaaaagactggctcggaacgtctcgtgtgggcgcaggggtctccttctacattaaaagctatcaccacagagctgaatggagtcaagcttactattgccgccgctatctgctgggaaaacttcatgcctttgcttcgtcaaagtctttattcgcaaaatgtgaacatctacctcgcacccacagctgacagccgtgacacctggctgcctctcatgcgcactattggtggcgaaggccgcacttttgtgctttcttgcaaccagtgcgtacgctacagtgaattaccgtcctggatcaccgagcagggtaaaaatacagaaggtacgtggtatatgatcaccctcagtttgcttacttaggtgttcaaatgactcattttctcttagaagatccagaccgctatatctcgcgtggtggctcctgcatcgtcggacccttcggcgaagtcgtggctgaacctatctggcaagtctccactgacgatgcagctgatatctctagcatcgaaaatgcgcttgtgatttctgacatagacttggaggattgtgaacgaggccgacttgacatggatgttgcgggaagctattcaagagatgcattccggttaacggttgacgggttggacctgaaccctcctccgttctaggaatcaagtacaaaagaaatacagttgggcaactctcataagaatgagaaatcttggaacgcctaactatgccaatacttggacagaaaatgtggcgaaatagtgtggcacaaggtgtgtattcagatgtgtatgtacatactagggccgatctataaaatatattattttgcctcgcttcactcagcaaaatcaacaatatttctttcgcaggtcttgtccgatgcaaaaggactgtacatcaaaccaatcaacaaataatctatatgttatctctgatcattttcgatcctaaataggaatttccgctggatgcggttcgctaatggaagttggaatgcggccagcagaggtgggccggattcagacgccaatccctcgggatcttcgtacccgcgtcgatcatcaagttcccttcttcaatactcgatctttgaccttgccatctttcctattatgacttgatttcaacacaaacactgtcccttgtataaactcagggataagcacacgccctcaatgcagttcgcgttacctccacggcggagcccgcatcgtctacctctcccccgttcctctcgaatgtcatcccatcgcaggaaacagttaaaatcggtcgccgtcctcgcaatcgcaatattatcccttctctatctcatccattacctccactccccaacctccatgtccgtggtggcttcggcgggtacttctggagtggtaatcgtcacactgctagaccgtcaacggtgcagcgagagctatctcaaaaagatcattgcaaacagggaggactacgccaagcgtcatggtaataaacccctatacaaagcagtgtggaggagcttcgcaatgaacttgatctaactttcatgcgggaacaggctacaccaacttcttcgcgaaagtctcagattatgacgaagccgttggcgatgctcccatgagctgggccgttgtaccagccatccgtcatgccatggcttcacatcctcactcggcatatttcttccatctcgcggctaatgctttgatcatgaaccctaccaaatccctcgagtctcatattctagggcagggccatctggaaagcttgatgttgaaggatgtacccattgtgccgccagatagtatcattaagaccttcgtgcaccagaaagaacaggatgtggatcttatcatcacccaggacagcgaagatttaaacccgggaagcttcattttgaagaacggggagtttgcgcgtttcttcctggacgtctggtttgacccgctttaccgcaacttcaactttgctagggcggaagcccatggactggtaagagaaattttttactctattactctatctttatatagatagcgcttcgagagccttgattctgaccgacactttgctaggatcacattttgcagtggcacccaactgttcttgctcgaaccgccttggttcctcagcgcattctaagctcctatagcaaagactcgccgggtgctgctttggacggcacctacaaggatggtgacctcgtgatccaattccatgggtgcggtgatgcagagggccgagactgtgcccgcgaactagagccgcactacaggctttgggagaagaagaaacagagagattaacgttcttgaagtgacttacattttggggtccacagtttctatgtggggaaatggcgttttgcttgggatctttcttctgttcagggtggtttacctagttataatgttctagggttgatcagcgtttggtcgtggagacctcaacatatggcgtatttttgctttcattggcatgcatagctgcaaaagggacacgataattgttttctatgtccaataccaaataatacatcatctcatgatatcagtaattagtgcataccgtttatcatgacaactagggttgatcgataagctgctcgagacttctttcaagccatcaacaaagacaatctaatgccttgctataattttcttcccttttcccactcaatcactcagcccatggccatagcatatgggatcaccaaataccagcctggacttgaacattcggccaacttcttaagcaaggccggggaagatgacagagcgcttcttcttatacttgtcaccaaactccttgcggtagcgatactccttcttccaagcccagctccacatctgcaacccacccacagcaacgaagatcagcacactccagttcaactggctgacaaggaaaatacccaaccaagccagaatctcaaagaagtagttgggacaggtaacgacactgaagccgaacccagacggaatgcctcgctcagtggtaccgggccggcggagattacgcaggatgtagtgcgcattcagattcgccagctcaccgaagacaaacagcgccagtccggcgtacacaagagcctgattgggggtactgctggcggcggtcgcgtccggacggaacacccagtaggcgatgttgaaaccggccagaacccagtagtgggcgctattcttgacgatgttgcgggcgggcatggtggcactgctgaaacggtgcacgaagattgtctcgaactcgcgcttcaggaagtgcacgcttagcagtgcgcagactaggagctggaggtttgagggcgaggggaggggcttgtcgaaggtgaagtacaggaggggtcggagtgggaagaggaagagcgcggggatcaggagtgggccgaggtattcgatgatgaaaacggtgcgccaggcaatttggggtcctgaagaactatatgttagcttctatgtgcgtggagaagagtgcgctggtcctagggctggattcgcattgtccatgatatgggggaaagacacgcaccgagatccttgacgtagatcacgcttgagtttaacaggccggtatcctcaatggtgacattgttcgagttcgggaccacgctgtggtcgctacccttggtgattctcatccggtgaattgagcaaccggatgctgcggagagcgcaacgtgcaattcttcactagaggcatcgagagatatctcaatttccttagggagcttgcggatgggcttgcctgattttagattagcgatgctcttaagctactctctctgtgatcgagcgatttgagaaaaagagctatgtatgcgtaccccttggctgaacgacgagtgtgattttatcagccgccatgatgataacgcagcttaagcagatacaatgcttaaagatggggcttatttgagaccaccaagataacttgaaatcgcgacttggctaaaaaacgtgcttgtcccaacaatctacaagttgggcctcggttgacgtcacgtgttgacacctgaggccacatatccaacgtcgcaatattttgcaatagttgggtgtctttcccagaatggcctcccacggtaggttgccttggcagcttactgaaaacaggggttcgtatggaatactacgatctttgcatcttggcgaactagcctgtggctatgcctgttgctctagatgtcttttgttggagattcgactggcctatccgccaatggcacactgtccaatgcagtattccctcgaggccagcttgaatgtcatcatttactggggcagcaaaggctatatatttcctccgtatctgaagtcacctggcctgtcagccgaaacaagggtatccccggaagctaacgaggccgaatatgcactgtagcggggcatggtggttccagggcagtgctggattttgtgggagctgagaaaaaaacaagctattgtaatatcaaatggcaacgtcaaatcagaatcgaatgatatcgccccatctaccccataggtttcagctccatcttgcacggttactttgaccgaacagcatcgtcagcatcgccaatcattgcccaaccaagaaccaagacagatcatagaagttcattattagagttttttacatgccattcgtattacattgtgattttctctctatgaaaacataactttttgcatagcctgagcgcatcgcagatcttcggacccatttagccgctgctactgccccaatcacagtgtgtagttcgatccacactacgaatcgaaccattgaatgtgctaatatagctcgtgtctatctttatctaggcagtcgtaatccgggtcattcgccataattggctagacaaataccataagacctggtcgacagggtataccccgtatagcatgcgcgaatcagagatattcgattgctcatagcagccagtggggcggtcctcttcacacacaaggtccaccttacgctaagaacgaccacgaatgagggcgctgctggacttcgagaatgtgatgtgcattcagccgtacgctttgctcggatggctctctcggcttactccgtgattaccacgggaggcttattataataatacacacccatttccaccgaaatgatcgcatgatgattcacttcgtcttttcctaattacctttgatagttgtgttgctcttttgcttccatatatacatataccggtaagcgactactattgtctttattgttcgactttcaactatacggcctcggctcaaggtcaacctatgacctcgaagttgacagattaatcacagttcgcactcggatttcttctgtatctgtattataccatctcaattcaccatgtctgaggaagagtccagcagcaagattgctcaggttgagcaagttgtgtctgcagccttgcggcccttgcccactcaaactggcgatggcagctatgtacaagagccaaccgtgacaggccttgctaaggacctactccactttgacctgaaagatgccaaaactttagcggaggttgccaaaactgccgtgactggcgaggctgtgaatgacagagattatatcatggagcgcgtgattcaggtttgtattttcgcgaggaattggctatgttcccactctaactgttctacagcttgctgctggcttgccttcgacatctcggaatggcaaggaactgaccaataccttcctcacccaattgtggggtgatctacagcacccgcctgtctcgtgagtcatgcaatagcgatgttggtctgtgtgggaaatgtccagtgactaactagtgatgcagctaccttggacgcgaggcggcataccggaaagctgatggatctggaaatgtaggaattgttcccttatagatcgagtatctctgctaaacagccctagaacacattttggcctcagattggtgctgcgagcaccccatatgcacggtccgttcgacccaagaccatgcagcctgctgctcttccggagccagaggctcttttcgatagtctcttgtcccggaaggatttcaaggaacacccgaacaagatttctagcgtgttattctatcttgcctctatcattatccacggtatgttatttctgttggttgagatctttgctataagagacacaagaatcaccgaggctaacagttttcagacttgttccagacggatcctcgggaccaaacaaagtcattgacatcctcgtacttggacttgtctccgctttatggcaacaaccagaaagaacaggatacagtcagaacattcaaggatggaaagttgaaacccgactgcttttccactaagcgggtcttgggattccctcccggcgtgggcgtgcttctcatcatgttcaaccgtttccacaactccgttgtcacgcagttggcagctataaatgaaggtggccgtttcacgaaaccggatgagtcaagtactcaagcttatgctacctgggataacgacctcttccagactgccagactggttacttgtggtctttatgttaacatcattctgaaggactatgttcgaactattctcaacgtcaaccgaactgacagtgtgtggagtttggatccccgtgcagagatacgggatggcttgcttggcgaggcacctgctcaggctaccggaaaccaagtatctgccgagttcaatcttgtttatcgctggcattcttgtgtctcggcccgggacgaaaaatggtcagaggatctgtataaagaattatttgatgggcaggatccgaaggagattagcatgcagcaattcacagggggtcttcgccaatgggaatcaaaactcccggcagatccccaagaacgtcctttcggcaaattacaacgccaagcagatggaacttttgatgataatgatctagtcaagattctccaggagagtattgaggaccctgccggggcctttggtgccttgaatgtgccggatgttttcaggaacattgaggttctcggcatcaagcaggcacgttcttggaatctggctaccttgaacgaattccgtcagtactttggtttggcttcttatcaaacctttgaagagatcaactcagacccattcgtcgcgaaccagcttaagcatttctatgaccaccccgaccttgtcgagctgtaccctggtctcattgtcgaagaggctaagcaggccatgaccccgggtagtggtctatgcaccaactttacgacctccagggccattctatcggatgcggttgctttggttcgtggcgatcgcttctatactgtcgatttcacaccgaaacatctcacaaactgggcattcaatgagatcaacaatgacgtctctgttgatggcggccaggtcttctacaaactgatcctgaaggcctttcccaatcatttccgtggtgactcggtttatgcacacttcccaatggttgtgcctgatgagaacaagaagattctgactagccttgataaggctaaaatctataactttgaccgaccattttacacggctccgccccgtttcatcaattcccactctgcttgcacaagaatcttgaaagaccaagaaggattcaaggtagtgtggggtgataagatccaattcttgatggagaacagcggccgtccttatggccgagactttgccttagcgggtgatctccctgccaatgaagcttctcgaaagatgcttggtgctgctcttcatcgtgaaaagtgggaatcagaagtaaaggccttctacgaggacattactctgaagctcctcgagcgaaactcattcaaggttgctggcgtcaatcaggtcgacatcgttcgcgatgttgctgttctcgcccaagttcacttctgtgccaatgtcttctccctgtctctcaagacagagtcaaacccaagaggcgtgttcagtgaacaggagttgtatcagatcctggccattatcttcgcttctattttctacgatgttgacgtgtccaagtctttccaactttgccagactgctcgtaatgtcgcacagaagctgggtgaactgacgctagccaacgttgaactcgttgctaagactggattcatttccagtctggtcagccgtctacaccgccatgatattttgagcgattatggcgtccacatgatccaacgcttactcgacagcaaattgccggtcaaggacgttgtgtggtcgcacattcttcccacggccggtgcattggttgccaatcaaggccagcttttctcccaatgcattgactattacctctccgaagaagcggctgagcatctggttgaaatacagcgcttgtctagggaggacactcctgaggctgacgagcttcttgtgcgatagtaagtttcttcatattccattacaatttaagaggccatactaactgtctacagcttcatggaaggagcaagactccgatgctcggtagcattgccacgatttgtcactaagccaacggtggtcgaagataacggtgagaaggtcactttgaaagctggccaggagatcatttgtaatttggtaagttctttgagtcctttgtctcttggtattcagatgttaacagagtacgaaatataggttgttgcaggccgtgatcctgttgcgttccccgatcccgacaaggtccgtctggaccgtgatatgagtctgtacgcccactttggcttcggtccccatgaatgcctgggtgttaaaatgtgccctcttgcactttccactatgctcaaggttcttggacgactggataatgtccgtcgcgcccctggtctccaaggccatctgaagaggcttgacggactgggaggaatcgccatgtatatggattccgagcacagtagcttctctccgttccccatgacaatgaaaattcaatgggacggagacctgcctgccaggaaggagtaaatgcatacgtgagagcttcaaaggatgtgaatcttgtttgagagatctctataatatttgcggctggttgtttgtatagcatgcatgcgttttcttagggatgtggttcaccgcatatcaataagtttgtagcaggcttttactctgaactcccacattttttcaaaaatagttgagagattgtggtcaagcatatttcatggtatctctccgtatgtaagataaaatgcaataattccagggttgcatgatatttgtgccgacaaactggaagtaaagacaggcagtcgatgcctgaggcctagcggggggaaatgcagagagccgctccgcccttctgccttttgccggcaagaccagcttctcttcacattgcgtccttctcttctcttctatcaaccttccgccctccttcatcttttccctttgacatatccatcttaatagctccacgtcaaaccttgagggataacgacctgcacccgttttcccttatttgaccgacttgcgatatctcatctctcagctatcgatttgagctttctcacccaagtaccttcacgattggatggtaaattcgatctagcatcgcttcgaattgccttttattgatcgtgaaatattactcaggtccccatcacgttgaatcgattcgattttcgttgaggcagcaaaaaagcatcaaaaacgtcataaggcatcttcgcgctctctccgcgacaccggtctttacgaccttttcaccccaccctctctaggagacaaccctcctggaatctctcaactccctcatgtttgactggtcaatcggtcgttaccatggggagaattaagaaggtcgccagccaaaagcatgaggctacaatcgtaagttactccccgacagcctgatgtgcaacccaactaaaatttttttccttccatcacagtcaccatttttgcaagaattcatagcgcatgccacaagtattcccgttccagagctcccgtcgcttctcaacacattccctaagctatggccgttcccgcgcggtgatctctaccattggatcaatgtcttggaccgattcgacgagattctggcctcagctgtggacaaatacctcctgaatactggccctcagacccaactgtttgcccgaagtgttttggaggaatcatattcggccgatgagagcaagaagccagcagagggtgttgatgctaaactaaatgccctgggatacggccctgaaggagatagagagcttgtggaagcagttcttgatttttctcgccttttgctcgagaaatgtgggaaccgaagcctgtacagcagcagcgatcgcctaggtgacctgttgaacaccacctcactttctctcctacaatctacattgcggctgtctctttgcttagctcaacgataccactctcgccagcgtggcacccatcaacagtccgtattgcagtcacactatgcgcttgatctcgaaaagttgcagaaaattgcggctcctttcccgcgtccagccatcgccagtaaaacaccgtttggcacgtcttcccccgttttaaccaagggaaaggaaatcacagccaagacgaaagtcaacgccaatgaactggtttccctcgtgcgtgatgacgatggctgggaggaatggggagatgttcgagtcctgtactatccctcaggctctgaacaggccagaactacgtccgaatttggccaaacagagcacggctcacacgttccagctacgccaactccattgcgacgtagcgcacaccccactcctcattccaaccaggcctcgaatggagatgaatcaccagctgttatcggtgggaaggcagaagaggctacacgagcgggtaaagtcctagagcttccctattcaaaagtttcaaccgcaaaggtggaagatcttcttgcggcgaacttgcctcatctgccccttgaatcaaaatatgagctgcttcacaagctccgagtcgccaaggcgttgacaacgtcgcgtgctacgcgcgaacagattctttccatcaaggcactggcagtgacaaatctggcccatgttcagccggagagtaccttccaagcaaaggtccttcaatctgacatggaacaaccgaagcgtcttcagcttacttaccagctcgctgaagtggttcatctcggtgccagtggtgacctcgcggtctctcggtctgttcaaactttggcgatccaggcgttggatgctttggccaagcacaaggttcgtgctatcgacgtctgtgcagctttgagcgtcaatgtcaaccacggaattctcatgttcttgacccgtaaaatggtcaatgaactaggccctgaaaacaacgacccggatgatgcttactacgatgagtggcgagatgcgttgcttgcactcctacgcactctcccaagctcgagcacacgtactccggagaccttggttgcagcaggtctgattcccatgtttgttgacatcttgaaactgcggactgaaaaatcccgccgagtctattcccgtatcatggagttccttgacacatttgtgcacgcggtccgtgatgcactgggtacattgacaacagcgaagggttttgacgccatgtctgatttgattgatcacgagaccaagaccgcgtttgagaaggtcaatcgaggggatggatttcctgctaaatacaaaaacccttcggttgactatcaaattccttactttcagcagcagactctgcgctggatgttccgtttcgtcaaccacatcatgcagcacaatggtggaggcttcgatcgtgttctgcgcaacttgatcgattcgcctcagctgttgacttctcttcgccttgtgttcgagaatgctcgtgtgttcggttcacatgtttggagcaacgccgtcaacattctcagcagcttcattcacaacgagcctacgagttatgctgtcatcgccgaggctggcctcagcaagagccttcttgctgcggtcatgggtcgtgaacttcacgttctggagaagccgccggccgtggaacctgaagaccgggagactgagaccgacaccgaggccgaaccctcggccactcaaccgcccagcgccgaagccgctattcagtccgagggaaagcaaaaggatcgcgagtatgccatcgtcagaccccagaacacccctctcgcacctggcataatgcccgcggctgatgctcttgcttgtatccctggcgcatttggagctatctgcttgaactcctccggtttggacctcttccagtcctccgatgcactagaaagtttcttcgagatcttcgagaaccccgagcatatcaagtgccttaaggatgacccagaactggttcgttcgttaggcacgacctttgatgagcttgtccgacaccacccagcattgaaaacctctatcatgtctgccgttcttgtaatggctgctcgtatcaacgttctggggcgagtcaaggcatgggagctaggtatgggcacaaaaatgtggacccaagacgccgacggcaaaacaactctttcaggagatgtcttttcattgttccgagagatcggcacagccgttgatgcacccatagacgaccctgcctcgtttggtgctccccagctcaactccaacactctgcctaacggcgctaagcttgtcgttggggatctagatcacgtcctcccttcgccgggccccaactttgagcctagagataaggatgatcatggcctttcggctacggactacctgttcccagctttgcgattcctgggcgctttcttcgagaaccagacgaactgcacatccttcatcctggccggcggcacagagttcttgttagacattgcaacactccaaagcttggcgtttgatttccacagcactaacgccaaccaagaggttaccgtgcttatccacatgctagcggaaacgaagcctcaccttgtggtcccatctcttgttcgacgcgcacaggcagcagtggacaatctttcagccttttggactgcgcccactggatcgggattcttcacagaattgatcaaaccagcagattcgaaaaaccctgctctcgagcctacggctgctgctaaatctggcacattcttcgtgagacatttgaatgctgttcttctccttaccgatgtccttcgcgaggttttcgcatcgccactgtaccaaacccggcctggtcagtctacctctatctttggccaagccaaccttgcggatcactactgttccctagtctcctcattgagcaaccttcttgcttcttgcgtgtgggaaggtattctcctagagaagaacatccccgagaagtggctgaaagcgacacaggcctctgctgaaaagcatggctctggaaagtcaaaggctgttccggttactgggaacctccaggagccttcagcaacacctggcgccgaacctcaacgtgagggcactagtgcatcagagacttctccagctcagtcgggccagggtccgaaagaagacgacaccgaagttgatgaacagtgtcctgctttcaagaatgcgcgtacgcttcgctaccttctaagcgctctgccaacctcgattacgggattcttgcacaacctcggactcgggattatcggcaagagacgcacagatccgctgcagaaacagaaagcgaatgcatttttggtctcagacgccattgctgaaggtgttcttcgccaactgcagttcgacccggccaattccagcaacagccccaagcatcgtttcgcatatctcattgtcatcctttcacacttctcgcaccttctttatgaagtctcttcagatcgtcccagtccgaactacttgacttcagttctcgtctcgttcaataaaaacaacggcctcaaagtattgaaagacatctgtgacgtcttcttgagtgatatcaagtcccttccatccgcggagtctattcccgaccaagacaaggagcttgctgaccggcttgcatccggatatggtggaattaaaatcattcttggattattcgcagacctcactgctgggaaattcatcgtggactctagccagacacaagccttgacttctcaccctgaccgggaccgcgaccgtcccgactacttccagccaggtcaactcttggtggatcttcgcatggagatcttgcccatggccagagacatgtggaactcggactttgcgacccagtcatcgagtccaattgtccgattgttgattgatatcatgcggttctccttggatggtgaatacgaggctggcgcggctcgtaaagcagataccccgcccgtcttggtagaggtgcccaagaaaccattcgtggtccacacggaacgagcaactgccttgcttgagaaagggtacacggatgttgatctcaataaagaagccctttatcgttgcaacaatcttttaacggcggctgaagaatactgcaaggcccagcagtggctacgagcccctcccagagtacccccgagtcctggcgatatcaaaaccggactacccgagtctgcttctggcatcgacctcctcgatgaccctggtcttggagaggttccacctttcaatactgccaattcgttagaccgctctggagccctccagttgattctagctcaggcgcaacgtcctcctttccccggaggcgatattgactccgacatgcaccgcaatttggccgaagctctggacaatgttctcaacgacaatgatgacatggatagcgatgatcgaggcgagtcatcgaatcagcgtcgacccgagagtcgtaatatcggggcaagctcttccgaatctaccgcgccccctcagggagaaccggtgaaacgtcgccatatggtcacaatcgaagatctggatgcagagaggcaaaacattcggtcaaacctgatcgatcgggctctggatattctaaatgaacatcatgatgtctctttcgagctgtctgacttgataacctcggctatcaagaagcacaacgagcctgtcaacttccgtcgagacattggagagactctcgttcaatcgctagtctctctacaaatggagaacttccagacagctggcaaaaagattgcagcttatgcccacattctcgcactgacccttcaagatcctgacatgtacctcgccactcttgaagagctcaaagattgcttctcgactttccttggatttatcaagctcccaacacctgaaaaggctgaccaagaaaccttcccttgggttggacacgtcctgctcattctcgagaagcttctgtctgatgattgccagcctccccagattgcctggaaactgccaagtcttgatgatcccaaccccagcggcgatgaaccagcccgtcttgaagatccacttgtctccctcgatgagaagacccagctatttgaagctcttgtcgagatcctccccagagtgggcaaggatgatacactcgcgctctccatgtgccgtgttcttgtcattctcacccgcgagcgcagcattgccgctcgctttggtgagaagcgaaaccttcagcgtttgttcgtgatggttaaacaactttctagcgctacaaacgataaacttcaaagtgccttcatgctgattcttcgtcacatcgtcgaagacgaagctactatccggcagatcatgaggagcgaaattgtggccaactttgagtccaagactacccgtcagatggacacgaacggctatgtacgacatatgtatcacctcgtgctgagagctcctgatatctttgtggaggttacaaatgaaaagctacggttgctccgatatgacaaccatcaacgtccacaggttcttggattgaaggccgacaaggatcggcagcaaaagcgaggaaggcccagtgtctttattgaagagccgaagccagaatcatcttcagcgggtgaagcatctgcccctgaaggcacggacaagggcaaggcccaaaccaagggtgccgaactcaaggccccaattgtggagaacccggatggtgtcattcattacctgctttcggagcttctgtcctacaaggatgtggacgacaaagaaaccagtcttgaatcctcagagcaggcagctgaccaatccgatactcaaactgatgttgagatggctgtggacgagccaacaccttcgatttcgagcactgccgaagcacaaacatcccgcggttccaagaaggcagaaaagccccaattcaaggcagatgaccatccgatttacatctaccgctgcttgctccttcagtgcctgacggaacttctttcctcttacaaccggactaaagtcgagttcatcaacttttcccgcaaggctgatcctctagccactacaccctccaaaccgcgctctggcgtcctcaactatttgctgaacgtgcttgttccccttggtaccatggatcatgatgagtctttggtgttcaaaaagcgcagtatcacctccacatggaccatgcaagtgcttgttgcgctttgcaccaagaccggtgaatttggtggtgttggtaaacgtcgtactgaccctaagtatgaggaggatgagcctgagcttgcttttgtccgccgctttgtgctagagcatgctctccggtcctacaaggatgctatggcctctactgaacccctagatgtcaagtattccaagctcatgtctcttgctgacctcttcgataaaatgctcagcggctactccttcaccaacgatacgggcttcccaacttcaaccaggcagctcgcgaagaccatgttcgaaaagaattttatcccggcgctcacttcttccgtcgccgatgtcgacttgaatttcccgtcctctagacgtgtcattaagtatattcttcgtccgttgaataaacttacccagactgccgtacttctcagcgagacctcggacatcactatccaaggtgataacgaggatgatgagatctcatcggcaacttccgtttctgacatggaagatgaacgcgaagaaacacctgacctcttccgccactccactctcggcatgctagagcctcgtcatgacgaggaagagagcagcaccgaagaatcggagggtgaggacgatgagatgtacgatgatgaatatgacgaagaaatggactacgacgaggatgtcgctgaagatgatggtgaagtcgttagcgacgaagacgacgatggcatgggtccaattgaaggtctttccggagatgcagtcgaagtcatccttgacgaagatgatgacgaggacgaggacgaagatgatgaagaccacgaccattcggacatgcatgatgacatgtatgatggagaaatcggtggtgacagagacaacgaaagcctcgaagatggcgcagaggacgaatgggaaagtgaagaaatgaccgaagacgaagaagaggtcgagatgatgaaccagtttgaagatgaaatggccgacatcagacaatcctctagacaccaaggtgaagatcaacatcttggtgacctattccgtgctctcaatggttccggtgttgatgatatccatggagatgctctaggtggtgatattcacgaagaaatcgatgacctcgatgaagatggtttgtccctccttagactgctgaggcaacaaatgccggcgcaaccaccagccttgctgacatccggtccagttgaagacgaagacgaaatggatgaacttgacgaggacatggatgatttcgatgaggaccaaggatcttatgaggatatggaaggtgagtccaactctctcgatgattttctcacagcattgctgactctcccagaagacgatgatcttcttgagccgtggggatgggaaggcgatgaacctccaatggcccgaggacatgcgcaatcccgcttccgcgcagccccaccaccggcctgggctaccgtcactgaaatcatgccgggtcgcccatccggtctcgttcccattcagccttaccaccgtgtccaccgaacccaaatcccgactcacggcaacgatgatggcactaatcctcttctcgtccggactgaccgcccagatcctactgttccacctcgggttgctgctgatgctttcgccgattggggccagtctatggaccctgcaggtggccgggttgttgccatggatagccccatcagcttcatgaatgccattatgcaagccattggcgggcaggcagcgccaggtttcggcgttgtcactcgccctgatggtattcacgtccatgtagaccgacgggcggtcttgcctggtcgtatccaagatatgctcgggattccccgaggagcaggccctccaactcgcactcgcggcgacgaccctcacacggccgtcaagtttggtcttggtaccaccagaaaccgctggcaagaagaggcccacattatcttcaacagccagtatattgagcggacccagcgcgtcgtcaactccattctgaggctcttggttccccctgccatcgaggaggaaaagcagcgccagaagctcgcggaagaggaacgcaagcgtgttcaagccgaaagggctgaaaaggaccgccaagatcgcattgccgctgaagaaaaacagcgcgagcttaagcaaaaggaggaggaagagaacgcccggctacaggcagagaaagaacagcaggaagccgagcgccaagctgcaggggttgatgagcccatggaagacgtccaagaaaccgatacggttgaagacgctggcccatctaatcaacccgaagcccaacccgctgaacccgctcgtcgagtctacacgaacatcaggggccgccaagttgatatcaccggtctcgagatcgattcagaatatctagaggctcttcctgaggaacttcgggaggaggtcatcatgcaacagcttgctgaacatcggtcccaggctgctgctgcgggtgaggaggatactgagataaaccaagaattccttgaggccttgcctgccgaaatccgcgaagaattgctacaacaagaagcggccgatcgacgccgacgggaacgtgagaccgcacgacgacaggcggccgctgctggtggtgctggtgctacgtctagcactcaaccggcggaagaaatggatgctgttagcttccttgccactctcgatccctctttgcgccaggctgttctcgccgatcagcccgaggatgttctcgcaaccttgggcccggattacttgaatgaagctcgtggtatgggcggtagcggccgacgcatggcccagtttggtgacatgagtgccattgatcaccgacagcctgctgcaggccaagagtcgaagaaagagcagagacgtcaaactgttcaaatgctcgacaaggctggcgttgcaacccttctccgtctaatgtttatgcctcttcagggcaacgctcgccatcaattgaatgatattcttcacaatgtttgcgagaaccgccagaaccggagtgaagtgctcagcgttcttctttcgatcttgcaagatggcagcgtcgattctacggcgatcgaacgcagcttttctcatctttctctgcgtgcaaaggcaccaggagcacaaaagacgcctcagtctaagcgatccctcgctatccagactgcctcgagcgtcagcagcgaagtgaccccgattatggtcatccaacaatgtatcgccgcgctgtctttcctctcgcagttcaacccacacattgcttggttcttcctaacggaacatgactctgcctcagctggtaaactcaaggcattgcgtaagggcaaaggcaaagataaccgagctaacaagttcgctctgaatgccctgctttctcttcttgaccgcaagttgataatggagagccctaattgcatggagcaggtgtctagcctcctgagtagtatcacacagccattgactgttctccttcgtcgtgagaaggagcgacaggaagaggacaagggcaagaagcctgagcgacctcaaatcgaagcatctgccgaacctgctgaggctgctgactccagtatggacacatccatgacggatgctccgcttcccactgtggaaacttccgaagtccctagtgaagagaccgcagagggtgaagaggctacttcagctgaagccaagaaacctgaagattccaaggagcccacaggagacgggaagcgcaagaagcgaaccatcgagcctcctgtcgttccggatcacaacttccgattagttgtccacatccttgcggctcgtgagtgcaatggcaagatattccgcgatacactttccaccatcaacaatctttccgctattcccggagctagagatgtgatcggcaatgaattggttgctcaagcgcaggccctcagcgataccatcctgggtgatttggaggatcttctccctcatatccaccaggccaaaactggtaccgacatgcaaggccttgctctggccaagttctccccggctagctcagaccaggcgaaattgttacgtatcctgaccgcacttgattatctgtttgaccaagcacgagcggacaagtccaaggatatcgagcctagatccgctccaaaggaagatgtgctcaaaaaactctatgaaagcgccactttcggcccgctttggagcaaattgagcgactgcttgactgtcattcggcagaaagagaatatgctgaacgtggctactattctcctccctctcattgaggcattgatggttgtttgcaagaacaccacgctgaaggaccagccgctatctcgcggcagccgcgaattgtcagtcaacagcaccccagccgatgctggtctcagcatggaaaacatattcttcaagttcacagaagagcatcgcaagattctcaatgagcttgtccgccagaacccccgcctgatgagcggcacattctctctgttggtcaagaaccccaaggtcttggaattcgataacaagcgcaactacttcactcgtcgtgtccactcccgcggcgccgagcctcgccaccctcatcctccccttcagctctctgtgcgcagagctgaggttttccttgactctttcaagtcattgtactttaagagcgcggatgagttgaagtatggcaaattgaatgtacgattccatggcgaggagggtgtcgatgctggtggtgtcaccagagaatggttccaggttcttgcgcgtggcatgttcaaccccaactacgctctgttcatccctgtcgccgctgatcggaccacattccaccccaatcgcctcagtggggtcaactcggagcatctgatgttcttcaagttcatcgggcgcatcatcggtaaggccttgtacgaaggtcgtgtactcgactgtcacttcagccgagcagtctacaagaatatcctcggacgatccgtgtctattaaggatatggaaacactcgacctggactactacaaatcacttctgtggatgctggagaacgacattactgatatcatcaccgaaaccttttccattgaaaccgatgactttggcgagaagcaggtcatcgacctgaagcccggtggtcatgacatccccgttacacaggagaacaaggaagagtacgttcagcgcgtggtcgaatatcgcctcgtcgagtcggttcgcgaacaactggacaacttcctcaagggtttccacgaaatcattcctcccgagttgatctccattttcaacgagcaagagctggaacttttgatttctggtcttcctgagattgatgtggacgagtggaagaacaacaccgagtatcacaactactccgcgtcctcttcgcaaatccagtggttctggcgtgccgtccgctcgttcgacaaggaggagcgtgccaagctgttgcagttcgtcactggaaccagtaaggttcctctcaatggcttcaaggaacttgagggtatgaacggtgtgagcaagttcaacatccatcgcgactatggccataaggatcgccttcccagctcgcatacctgcttcaaccgtaagtttttctccgcatttcttgattacattagcgcattttactaactatcttaacagagcttgatcttcctgagtatgaaagttatgaagatctccgtcaacgcctttacacggccgtcacggctggaagtgagtacttcggatttgcctagactgctgtcctgttctacggtatgggaatggttttatcaagccaaagcattgcacggcgtttctctcggttcttacgagattttctttttatggggacgaatgcggaaagtggccagcgagaagtttctttatgagaagatgaaaactgaggcaagtggtaaggaattcggttgaagtgcaggtcaaccgtgttttttccagcgccctctctatgtacttagattgctgcatctatttcttttacttcaaatcggccgcgcactaatccgtactttactggccattgtgagtagaacttcagggcttccagggcttgctgatgtcatcaggcggtcagcccgtcacgggactacgtagaaaaaaagacatgcggggccgcggaggaaaaacgattttttgagccgaacacggtcatcttggagaagagtgtgttttgtgcatcttggattgaatatctcttctttaactgtttcacagagccctacatcatgtcgaccaactccattaagctcttgactggcaacagtcacccggagcttgccaacctagttgctgaccggtatgtgcaaccggctagggcaaaactgggcaaccggctaattctagaactatgaattaggctcggcattgagttgaccaagattatggtcctgcaatattccaaccaggaaaccagtgtcacaatcggagagagtgtccgggacgaagatggtaagaacatcccaccttaatcgtgatatcaagaacccccgctcatatatatatgatttgttacagtcttcattctccaatcgacaaaacccaatgatatcaacgatggacttatggagctcctgatcatgatcaacgcctgcaagaccgcctcggcccgccgtatcacagccgtcattcccaacttcccttatgcccgccaagataagaaggacaagagccgtgctcccatcaccgccaagctgatggccaacatgctccagaccgccggctgcaaccacgtcatcaccatggacctgcacgccagccagatccagggcttcttcaacgtccccgtcgacaacctgtacgccgagcctagcatgctcaagtatatccgcgagaacctcgatgtcagcaactgtgtcatcgtcagtccggatgctggcggtgccaagcggtaagccatgtctatctcgatactacacgtatatgtatagttcaagggctaatgtggatttagtgctactgccattgccgatcgcctggatctgcaattcgcacttattcacaaggaacgtgcccgccccaatgaggtctcgcgcatggtccttgtcggtaacgtcaaggataaggtcgctatcatcgtcgatgatatggccgacacctgcgggacgctcgtcaaggctgcccaaaccgtcatgcagcacggtgccaccgaagtcaacgccatcgttgtccacggtattctgtccggcaaggctattgagaacctgaacggtagctgcctcaagcggtatgtatacgtccgaatgccatcgacgagtcattgcactcttggatggtttccgatttttcggttcacttttggctaactctctactcgcagcattatcgtcagcaacactgtcccattgggcgacaagcaagagcagtgcgacaagatccatacgatcgatatcagcccaacattggcagaggcttgccgtcgtacacacaacggcgagtcagttagcttcttgttctcgcacaccgtggggtaaatcagaggcagaaatgaatttatacatcaagacagaggatcaaatctacgggttgtcctagtgattacctacgaatgttggcgtgaaacccgcggagtgagcgggaaacaaaaaaatacgattttcatgacctttattagccggacgaggatgttagtccccgggtgttttattattgtttactatacttttcttttgaagagagatcgacggttaagtgttggatctgcgcagttctctctggcggaagttggttatccttggctgggtttggttgcatcgtgcatgtatgtggtcttgatatgcagagtacatgtactttctatttggtttagattattgcaaggtctgggggccgctttacaacttgaattagatcgtcttttcttactaaggaggtgctgctatgactatgttgactgcatcggtgtagtcttaatatgttgttgatccaacgatatatataggtttataacaggggttcattactggtcgtggaggtgaagccggaacttttcccatccctatcttctccaaatacgtaccattgaccgcaaagtgcagtcatatcttgaaaaatataattccaaacgcctttcgatatcatagacttataccacgtgacctatacctaaacatgactttgggggaattgtaactggcagtggggaatttaaggtaatgacttgattgaactggtgttttaagtcacttcattgacacttcattcaagtggagtagaagagtccacagagaggaatacaatatgctacgcctactccttgaaaaagccatgagcaattgacagaactgagtattgaaatttgcatgcactccattcaaaaaaaaagggtcatcaaaaaaaggtaggttcaacacagatatgcattgcgactcccaaggcccgaaatcaccgtagccaaacacaagggagtatcaaccactcagcctgctttgtacgttttgagacctgttccccgtcacttttcttgttcccatttcttttttatcagacatgtatcctccgcgcccctgagagtgattcattttttatgaattcccctcaaatcatcccagagacgtgaagctcctccattaaaccccatcgccgcagaacgaaatcataaaaccgcgggtttggaagtttacttccgcatggaagaagctctccgcttgcggagctcatcacgcttggccttctcctcgtggacacggccggcaaggagtttagcgtagtcgttactatgtaaccgttagttcgagttccaaatcacatcaacactcataaatcattgatcagagcgaaatagagggagtcttacgcagcatcacgggcagtctcagcacggcggcgcttgatggcaacgcgttggcgcttgcgctggagacgctggggggtaaccagacgctggatcttgggggccttggtgtaatccttcttgccctccttggtgacggtacggcggatgacgaacttgcggacgtcgtccttcttgtcgagaccgaagaagcgacggatcttggtggcacgcttggggccgagacgcttggggacaacggtgtcggtgaggccggggagctcgccctcgccctgcttgacgatggaaagagcaaggacggcaaggtccagaccggtgatggcaccacggacggacttgcgcttgcgctcaccggtgcggcggggacggtagcagctgtggccgtcggcaaggagcagacgggtacgggtggggaggagaactgtagaaatcattcgatgagcatcctgcggtttgttgatatccctgggggttggatataatttttttgatcattccccaggttgttgtgcggctgtgtacgtaccaccctgcttcatggggaaacctgtaaattaatcgtcagcattgtggttctcgttatgtgcgttggattgtattctccattatcgaaatgttgctccgacattgggaatagagattgtatgcgtaccctgcttgtcgttaccaccggtaatcttgaacacgtaaccgttgaactcgtcaccgagagcatcgccggcaacctaatcaaaagagataccagttagccagttgttctaatagtcgtgtgtgtgcgtatgttgttcatcgattgaatgtcggataggcggggaaggatgaagaagggagtgctgacttcggtgcccatgcgcttctccatgaagggacggagcttgcgctcatcatcgatctcgataattttctgggacccattggccgggtaggagatgttgagcttcatcttgacggaggcggcgcggtcaagacggtagcgcgggtgttgtcgatttgtgagattgtcgtcgagggagtctgtattgtggatttttttagttcgccggcttagcgaggtgcaagtcacgtgtcacgtgtgggaagtagggcttacgtcggccagatggggtttagcgtggcttggtaagtcatgtgactctgcatcagcaccccgacattttcttttcttcgtccgactcaacaaatctacggcgctggcccctaaaataattgatactttcagcgataaatataagactcaatccgacaactatgcatccaggcaacaacacatatcgaggaccgccagcaactacagtttacctccgccttgaaccgacacagtctcctttacctttaccctggcatgaaacctcccagtgtgactttcgaacacaactgactttgaatcaccatcggaatgatgaacgaaatgttcggatcatgactcagtctcgactggccgaactcaacttttatacatatcaaagactgagcacggtctcacaaacgcctcattgacagccaccacgagcctcgtacgacaattgcaaataacagcctccactaactatatttgaggacctttgatgtgaacccgcatgtcagacactgcaaacgccagtgcataacctctggatttgtaagacactatctcatggatagatggattagtcctgggattcagaaatccgatccattgggctcaaatccatattagggacgtttgaaggtgatattcaagatagccccacgacgtgtttttggatatgttttagatgtctctccccttcatagtgtcatagtcagataaaaaataattagtaggtcagtcctcgtacctttcctccatactttattctcttccatgcatcatttcccaataaaaacgttgtgtcacaaactccgctctagagatctgcagtatataatgtcttggcatgtctcataccgagaaacaattgcatgtccgacgggcaaagagttcaaaggaacgccaaatctcttgagacaatgcgaaacagaacctggacgtggccttgtgccgggctttgtatgcgatgcgagtactccgtaagtctagacctgatctccactattcggaactgaagaattgcgaaagggacaggagaacccaaatatcaccgagaagcttgctgaatccgtatacggaagaaaataccagatcaagcaattgtggctctaaatcggcgactctgatttgtccagtcggacgttagtcgactcggctctccgagccacgcggccaacctacaagtgtgacgaattcgcgcctcacgtagggattctggttttttttgggaattaggtcttctgcttgctagtcctagcttataatatagacacttccgtcctgtttctatcttctttccattttcccctagcgtttctggaggaaccgccacatacccgactttgccggtgctccttgtccgagtgggggatttcgtcgcaatctccaatttttttgcagtgccggataatctcctggttccccgcacaatcggtgagacattcgttcctgattatcttgtctcacattgcttctgggggattgctatatactttgggagcatttgtggcgacttcatctccgaaacaagcggacgacgtgaggtccaagctcgacattgctcgacattgctcaaggggcatattctggctgtggccgttcagtcgccatgacgcgccttttcaaccgtttctacgcgctggctgctgtcgcagtctgcatgattttcacatcggcgtggtttttgacgtcacggaggttctccgatatcgtcgtccctttggtctcagaaccgttccaagtagccagcacattcgaccagcgattagtggtattcggcgactcatggagcgacaacaaatccgacgaggcgcagggcaggatttggacggaccggctttgttcaatggtaagataaccacccgagagattaaaggagaaacaagcgtgtctgacagaacctgaaacacgattagttctcctgccaccaagagaacctagcacagacagccagtccaggcaagaacatcggcgcggtggtcgacaactcagaactcgaccatctagaccgactgtctcagacccacatcgccgacttcaagtcgcagctccggcaatggctagacgccgagtccgtcgcgatgaaggatcttcccgaggaagaggtgcggtcccggcaggaccgcacgatcttcgtcgtctcgttcggggtgtgggatctctggagcctggttacaaaggactacgacgtagcaagcaaatcggttgagcggcgcattgcaacgcttatgagccagctcgacacactgtccgatcgctggggcaccacggacctgaaggttattctgacgcagccggtcgacgtgactttcctgcccgggtttaactcggcgggggatcagtacaaggatacggtgcggatcctggacgagtggaatgggaagctgcgggaggtggctcgggagtggagtcagggcactatctatctgtttgatacgaatgcttttatgatggaccgcattcgtgactggcagctctatgcggccggcattgaggaagagaatggtctaggcaagaacctggttcctgggtgggagaatgtcgtggagccttgtgtcgagagtgggttccaggtcatgatgtcaaaggagaagaaacagtgtgaagatccagagaggtatctgttctggtgagtggttttcttttcgtcattccctatcagttgtgtatgaaatgtggttggggaagggatcgacatgtccaatgccttttttgctgactgtgacattgatgatttcaggaacgacatgcatttgggtccttcagcacaccggctcatggcggcggagatttaccatgggattgatgggattatgttgaacccgaatgggaccgagaagcgccacaaccggcggtttgcagcttagacattgtccagatgaataaagattcaaacatccaagacattcaaaaccttcaaaatgagacaaacaactcaaaaatgagaaaagaaagaaaaggaaaaagaaaagatcggtgacgtctggccgggggggttgtatagccatgatgtcggtacccgcgaagtcaaacgcagaaactatacttgatgcgggtgagccatggccaggttcctggacaatcaaagtgtgtgcggtggatctgaacccttggacatccaaagggcacggtagtaccgatggtcaaactggaacctggaacctgcagaaggggttattgaaacacgggaagatccagaccgatatccattacccgagacaagagggaaataggggggaagggtggtattgttcgaagcccacaagtgacagtgactgtaacgtgcagtggatcgcgagatcggcaatgagatcatcccagatcccggcagtctgatggtaatttgcaattacgggagatttgaagaataactgttttatgaattgaacagctgacaaggacaatcaagctcgaagtctaaaaaggcgaaattaattgtttcactgatttccagaaataagaaagaaataagaaacaaataagaaataacccaatttgttctctttgtctgatttgccggggaactgatttaggacataccccgaccaatcatgggccggataataagttgggtggaccatagtggaccctcgtgggccagctcgatcaagcgggtcgccgcatccggagacaaagaaaacaatgactctagtggtcttggccagggaaagagagggaaataggggatttcttggggagttgggagttgacacatcgattttggtctctttcggtttcttttggtttttttcttttttcttttcttttcttttcttttctttttctcttcttttcgtttcggtctctggttgggcctaatcggaaggtaccgtgtcgttgggagtatagaaatcgagatcccccaagtctccctatagcgaatataacaaagaaaagccgcgattaatcctcttttcgtacttttattttaatttctttttctctcggttggctcggtcagaatcccaaggcccaggagctattgtcaaagaaccaggcgctagacagggattccgggggggaacacccaacaagacaaagaaaaaccgcttttagggcttttgtgtccaaacgcccatatacttcgctttgtgctgatccctgatattccccggtctttcacgcattgcttattgggattatttcccatttttcctcccgaacggattcattttctttgttgccgtcggtccccatctctttcctttcttgttatttcttggggcccaatcgcccccaaacctattcccttctgccttctctttcaaagccgtatatacactttttttcctcctacctttcccttgtgaccaatctttctttgatcctcatcttcgccttcgagccagttcattcagagaaaagtattaaataaatgtcttacgatcgagttctccccaaccctgttgctctacgatatgagtctgcccaagtctcgctgcctagaccgagcaatttactcgatcacaaagtcatgaacgaagaattgcccaagtcggttatggccatgagacaccccgacggcgcagtcagatatgccgatccgaggtcaacggggatacatcagacacatcagcatatctccaaagaagcacaccggatgtcctccaatgggcccggcaagcctgtcgggcccatgatctctaccaaggaattgccattgcgagagagatcggatcgatcctcctcctcgtcagctagcagtaccagtcctgtcaaatcacacaaagagagtgccctgcagttctgcctctgtcagccggatccgaagattccccggcctcgtaatggtgagtcgatactgtccgcaccgtcattacagtttggcaagtgctttttcgattgtttcttttttggtcgtcgtcagccagatcggatctttcgaacgcatggacatggctaatattggtctagcgtttattctgtatcgccagcattatcaggccatggttgttgctcataacccgggcttggccaatcctgagatctccaagattattggagagcagtggcgttctctttcggaggaggacaagagtaaatggaaggcacttgcagaggtatgaaagcaatcccagagatatggattcaaacactgacattacaccaggaggaaaaagctcgccatcagcagcaatatcctgactaccgctaccagcctcggcggtatggtcgggatggaagcgcccgaagctcggccacaggaattgggcacaatccgtctggttcatcacattgtaacagatgtggtggtcgattgatgaatgcacccgcttcccccatgaccccgttcacacccagcagtgggcctggctttcgaccatcaaacttctcaccacacccaagtagcatgccgccaagaagcgtccaaggccgtgagaaagaccctagtccaccaaagtcggccaagatggaccacgatccccgctctcgccaacgacactgggaggaacccggtggtcgatctcctgacaacaaacgccgccgagtatcccaggcctcattcaagccaactttacatccctaccgggaccacagtcctggcaacggcgttccagagtcaccgcatccgatgaccccttggagtgctcgcccggagatgccaccacgccatctccccatgcttcaaccgcaacgaccatatcaaagcgtccagggacagtcacaccccgaccccagtctgaagctaccgccactccagaccacaacaccggtgatgactcccatgacaccctatccacaagaaggttccagtgtcgaagcaacagtcatgacaatcccattcttcaacaagatcaaagtcctcgccaaaatctccccacccctcctcccctcattccgggacggaatcccaccagcccgcggccccgtcatcgccgtcgacggccaagacccagacctcgtccaagcagccgtcgaatacctcaacaacctcctaaaaaaggaaacaaagtaccacgtacgggtattcgacggcccagaaatcaaagccccccgaccaacctccgcagaagccggccagatgggcgacgcgacagtcgactacctcaacaccatctccgcctggcaccggatctccgacgaagtcgtcaacttcgtgaaacccacctcgcgagccggctccgtcgacgcccgctccataaccacagacgaggaaacccccgtccccaacgtctccccccgcaccctcatccccaaaactgcaaacatgcacatccactccccagtcctgtccagcgagaacggctccgaggtcagcgccctcacatcagccagccactacagcgtaccgattgcgctcgtcccgcgctaccagctcacgacggcggatgcattcgcctgctccacgcccatcggcgactcctacgcgccgctcgaccactggcagtggatggcgtcgctgtggcgcgcgtgtgtgggccctgatatcacggtttacattcgggagtgcagcaaggaggagcttgatcgcatgggtgggaatccggttgaggtgcgattgcaggatgtgcgcacggtggtgctacggaaggttgctgggagggatttggaggagaaggcgttgaagcggatgggttttgagattgaggattttttgacgcagtaagcttagcctgcttgggctgggctatagaatgtgatttggtgcattaggattgggttcattggttggggcatgtgatagatgggatcgtggtaatttgatgatggctcatcatgtttctaatacaatattactagtgaacagtgaacagtgaactgtataatgaggttaaaataacaatcgacgtgacatgtaaggtcctaagaagccagcgctcgggccctcttggtccaccgaaagttggagtctctgggtcccgaggcggagccgcttatccaaggcggtcaccattatgtatgcctatctccgcattttattttatccatgcatgttgtcttcctacaactattcaccatgtcggacctgtcccaactgggcccagagcgctggaacaggtcgccaatactaataagctctgaaccttctggtcttccttttatcccccctgccagtcctcctcccgatgtgaaattcgagatcgcagagatagatgagccgctcaacccattcgtcccagagccagatgagccccttgacccagaggtggatcggtcatctctaaatcgaggggaacatcttccacctctgggtagagagggctatctgcctctagatcccgaggttcatttgtcgcctctcgacccccgcaccccaaaggcaaatacgcatttcgataactatatcccagccggcgttttgggcaaaacccgctccacgtcccgctacccagactgcgagattagactgctggaaacacatgaatggatccgcacacgctttcttgtcgacagcagaaatgtacagattttcgtgctaccaagggcagagaaagtccgggatcaatctggaaagactctcaaattcaaggctctcagatacgctctcaaaaccgtcatgtccatggtcgatagctcctctgaagcatggaacggcttggttgatgcccgttttgatctacttgccaacagtcaacctgacagcgaagaagaatcactatattacatatacaatacgctgcaagaacccaaaccagacttggaccaagtaacagatccgatctcgtggcgtgttatggatgaattacttaccaattcggttcgaaatcttaaaacatcacttcatccgtttcagcgcgagtctgctgctttcatgattcagcgggaggtacagccggccctggcgcttgatccgagattccagcctttacggggtccgaccgggttggagttttattataataaggagtctgggagcattttgcgtgataagatattgtatcccgaggcctgtggaggtaatttttgccactaatctctcaatgatggtggtcaaatatcttgtgaactatactgactagtactagggatattggcagagtccatgggatgcgggaaaacactcatcagtcttgctgtgatattggctacacggggacatttccccaaaatcccggtggagtatcaaaaactcgagaaccccgtcaggcaaaagactggaacattattgcaaatgactgctgctgctgctgggcgcttttctctgccctggaaggagtacattgaccagaagagagcctgtgggcaatatctcattaattgtgagaaggcctgcgagacctaccgtggttcctatattatccccgcaaaagagaacgcaagatctagatcaatgtacgtccaattgcccgaggaaattcgtctctcctctggtacagtcgttattgtcccggacaacttggtggaccactgggaacgcgagatcgctactcacactagcaatctgaatgtcctggtactgcgaaatagtacccctgaaacaccgtcagcggacgaacttctagaatttgatattgtgttgttaactaaagcccgatgcgttagagagaatccaagccgtggaaagaggccagattctcctcttttcaatcttcactggttgcgagttattgtcgatgaagggcatgacctttccagtcgagtgacgaatttgtcccacttgctaggcaaactgaaattcgagcgccgctggatgatttcgggaacccctctttcggaattgtatggagtggaactgagcattgcatcgcgggaagtgaacatagacgatcctgtatcgtcggacgaagacgcatccttgcagtttcacaaaaagacgggcaatgccgtcgatactgaaatcaaaaatgtgagtaaattgggtgatatggttcattatttcttcaacctcaagccttgggccaacaatcccgaagattggctacgttatacaagagcggtgggtgaagatggcattcgtcgaaaatctccttctctacgtgcgatccttcagggtcttgttgtgcgacaccggtacgaaaccgtcaaaaaagagatcactcttccaccgctgtacaacaaggtcatctacctggagccgaccttctacgaccggctctatatcaacatgttcctcttcacactcgcagtcaacgccattacatctgaacgtgaaggtcccgactatatgttcaatgggaagaagacagggaaaaagaatagactgatggagttgatacaaaacttacgtcttgctggattttggtgggctggtgatgacaatgtccaaagtactgttgacattgctctggaatatctgcagaacaacgaagagaagatgacagcggcagatgtcaaccaattaaaacaaggtatcgagatcgcacgaaaggcaattaactccactggctggaatgggttcaaaaatatgcatgagcttggcgtctttgttcgaaatttcccagagaatgctcgcaacatgtgggctcttgatcctacagacgccgaccgcgagcccctgctcatgggtatgacgcaggcccttcgcgcgcaacaattcgtgatgaaaaatatgggcaggatcgatcccactgcaggtttcgcaggagagggtatcaaagttcgccaggggctgcttaagcaccagacggctcgttctgcttacagtggtgcccaggggccgatgaatccaaaggaatcaaccccgccaaaaagaaagggtaaacaaagttttgagaagaatctcccacagacttttgaacaaacaaagctggaaggagtagcatcggccaagcttcggtacttgctagagcaagtgctggagttccagaagaccgagaaaatcatcatcttttacgagcacgacaacgttgcctcctgggtcgagcaaggcctacagttaataggcgtcaaattccgcacctacgctagcgccgtgagcatgggctacaacaccaaatccgagaatctggccgcattccgccaaaccgacgaggtccgcgttctactaatgaacgtcaaacaagccgcgcacggcctgcacatcccagaagcctcacggatgtacatcgtcaacccaatctgggaacgcaacgtagaaagtcaagccatcaaacgcgcgcaccgaatcggtcagaaaagacccgtctacgtcgaaacgctcgtcctaggcaacaccctcgaacatcgaatgctccaccgcagcaaaaacatgacttccgaggagaccaagaacgcaggaaagaacccggtggacgacaagaccatgagcgagatcatccaaaacgagcccttcctacccatgcccgacgacgaggcctcggccggcatggctccgctggcacaaccgatcgtgctcttcgagcccgataacgtggtccgtgcgcccgggccaccgcgctcgagaccgctaagatcggccccgtcgccgtggaacccgccgcggggcgtagagcccaatgccgattccaattcggtcgatgttcaggggcaaccaccgcccaagcggccacgctttgcggagcaaagtcaggtgataagtgtgggtgaggctcctgcgccgcagcagcccgtgctcggggttaattcggcttctggggctggggttgctgtgtggccttggccgactagcgttgcgaatcctgcggcggttaactgggatggttttggagcgtctgatccggtgcaatttgtaccgatgggctctgtggtagattcgacggggaacggggttgatacgcgagcctccttgttcgggccgttcgggccgtgatgtgatatgtgtcattgtactttacgttctagcgctgttttttgctccatacccatttagttatagaatatcagcttattcaagtcaagagaaaagaattagttcatgccaagtacaatggagcagactaagggggtctacgagtaggatgtatcgcaaacaatgggattcggtctacttgaattttataggctactccaagacgtgatgatcaaagttatgcagagaaagtcgtctgcacaatttgagcttctgcgcgccttttactaccgtcgagctatgaaaatgagaaaggacgagaagatatctaaaaaaagacacggcaagacaagaccgcataggctgactcctcgtgctactataaatagggaaataattactccacaagaacgacatatcaaaagcatggtatgatcaaaggtaaaaatatcttattagagctagctacctacgaactgctgcgacatgtcaccctcgaattcccctagtcaagacctaactttaaacaacatgccatccttcggccactagatcatcaatattatcactaagactaaaacaattcgccccatcaaagagatggaagaaacctgtaactccaccattatcgcagctaaatcggtgccccgcagatagcttcgttcatacccacttccaacataacattcctgaagattatgattgctattgccactgttcagaagaaattcgagtactaactaggcttctgaaacaaggtgaagctattattacttataccaagtgaactaaagcccccactttcaggctcagatacatacttgccatatcaagtagttatatattttcgtttaatatctagactttttgttaatctattatactattctagtaagcttgatactaaccgaatctagtgtaattgaactagtcttgtaatattctaatcgtttgataccccgccggtagcttcctaataacaaggtggcaaggtaaaatgggatgaaactggagaaaagatgtgctttcctgaccagccgagtcagtcgatagtggtgttcagaatgagtttaagctatcttcctaaagttgctgcttaaagcatatacatggagtcgagactcctatctccttccaagccatttgatgtagcaccctcagcaagaagcttcttcttcttcatatttctgcgcctaagcagataccagcatgctgtgtagaggagcccagcgacacacgtcaaaccagcagagaccgcattaccctggatatatcgaggcttttgtgtgctagggtatagttgcgatgataccatagaagaaatatcagccatggtatataccattggcatggaaattgcacgtttggaatccggcgcaaaggtattagttgcccaggtgacagcgagcgtagaaatcggatagaggcctacaccagggattagaaatgggtatcaagagacagagctgactagagcctgcttaccaaggacgagaataaacattcccgcgtagccagcgccggaagacgatgttcccacacaaatcaggtaaccgacagcaaccggaacacagcagcctatgatgaataggcttcgtcgcttgagcttatcagaaaagtagacctgtgtcaaaagagagatggcaccaaggacatagacaggaatggtcatatagttagcctggagggaggtgtatctaattcagtcagcaaggtgctcaaatatctcgttcgatataggtacttacccgaggccattgataatagaaggcaggaagacaccgaagccattgattgcgacagatgaagtgaagaaagctatgcccaggaagtaaacaaatggatctttcagtgattccctagcccacttccagtcaaactttgcttcacctcggagcacatagtctcgctccctcttcagacgcatagtctccttctcttcctcgttaagataccatgctgtttcggccgaatcagggatgaagatccaaccaattccaccaatgaatatagtaaagcagaactcaacaatgaatagccatctccaagcggcaaggcctcttcgagttcccatagtttgaattccataggcaaaaaggccaccaaaagcgccagcaatgcactgagcgaggttggttgtcatgatacgctttcctgcttgttctttagggtagattgtcgagtagacgaaagcaaatccgggagacagaccgccttcgcaggcgcacagaatcatacggacggcaatagcttgaccatatgtatggataaaggcagtgccgagggtgcagatactccacaagaggaatgcagtaccgagtgccttcctggcaccaaaacgtctaacaaccagggtccaagggagctcgccggcaaaactgcaaaagctggatagagtttggatattattgaattggttgcccacaagacctaagtcttgctcaaagccgaagataacagcatttccgatctagtgaatggttagacatgaatagtttgtcaccacaccaagaattcttacgttgtttcggtccagggcggacaggataataaagatgagggaaactggtacaaggtatttgtcgaattttcttcgtgcggctgcttctttctggggatcaatgtagatagttgagctagcctcattagaccgagccgcaatgctgacctcagtgtcgatgactgtggtctttgtatcttcagtctttatatcaaagtccattgggacggcttgtactggggataggttctgcaggaagtcagatgcctctggagggaagacgatcatgaacttccagtggcgtcactatatactccatgctcagatactcatactgccagttcaacgtatacgccggaagacatggacgattgttgtctcggtcatggtgatattcgataaatgctgacataatctgaaccttgatatctcgataagcttgaaaatgataagacgcgcgatcggacatagccgaatagagattatcgcaaccaccctggggtaagtcggctttctccgatggagcattcaaattcatattgccttcgtaacctaccatgaaaccccgtccaggccatgccagcagctattctccatatcatttgttgatcccgattctcatctagaatgtcgcaaatgcaatcgtcattgcctccggccgaaaggctagcgaaaggaaaaggagcaactgcttgtctgaggtaggtgacccaatatcgttcgtatggtagatgattcggggctaaactaattcttagatgtcgtcggagaaagcagaaggtagccatactgtttgccctcggccgacaatctgattgctgacaatttgttgaacagtgtgatttgaggcatccgagttgctccaactgcgaaggcgcaggtgtcccatgcatgacatatcactcacagaataaatccacggtgagtctttctaataagagctataatattaccgcacttaactgacatacttgaaggttcctcgtaactatgtgtcggagctagaggcagaggtcgagaagttgactcggcagaaccgcgaactgagagcacgagcccagtctgcttcggttaatgatgagatgactaccccacgcgacaacctctccccgggaagtctggccgcgtctgatgcaagttcaaatcatgtgcaaaacttggtgaagagcgtcagtgatgttgttgtcgagccgtcaaggcagccacgattcttaggacagagcggcggcatcacccttgccaagttggtcatatcagcaatccgcgtcgaggccttgacctctcccctgtttattgagccacgctcgtataatcattcgtcgtcctcgatggcagccgaggcttctcttccaccgcgtcatgctgcagaccacctggttgatgtctacttccagtaccaaacgccccatttacccattgtgaagcgttcaagagttgaggaggccatagaaagcgcataccaagccgcgagtggccgggaccttccggaccgagcagtagaaacggatattttcatgtcttttatgatcttcgctatcgccctctgtgacgtttcaaacccatctggaggtcgaccaagccagagtgaggggtgcttcaaatcagccctcagtttgtacgaaaaggtcgttacgagtttggaaagtgatatcgagactctgcgcactatccttctgttggctcaatttattgcattgtgcccttcccgagggagtctatggcatctgaccggtatcgctttacgcttatgtattgacataggcttacattgggaaagcgaagatcaggctacgagtgtggatcccgctgtattatacgatcaccgacgtctctggtactctacatatcaatttgaccgtatattatgcatcacgctcggtcggccctttggtatcatcgacgaaagcatgcgtgtgccacttccaaatccatgggctgtctatcaaggagcatctagcagcgaatccaccggatttgatatctacagccaacgagctcataaccacatgtttagcttatcgatgcttgagtctgagatcaaacatgtgcaacacagccaagtttgggctccgaaaatagcctaccctagggcaaactatgcagtgtggcttcaagatatccaaccccgtcttgaagaatggtacgccactattccgcagactaccaaggctcacccatcatccatatttgcatatcaggcgtattgggactatctatataacaacgcagttatcctgctttaccggcccaattctaccggatcacaaacctccccggaagcaacagtcctctcttttaaagcctcttgtcaacttataggaagtatcaaaaccctacaacgagaagggaaggttgatatactctggaaatcggcccatcatctctttatggctggcctgggggtgatatacagcctttggcagtcgaaagaagtgcgagaccggaatccgattgggagtagcatttccgcgctgcaatcctgcgcctcgacacttgctgcaatggctgagagcttcccgggggtctcaggctgccgtgatgcttttgatactctatcggaagcaacagtcgattggctagttaataataatgctgcggaactacaccatggccgtcaagagttcgagaaacaagcagaggacgtcctgcaccggctacagccttctcgcagagcacatgactgtaatggaatggatatgtcaggcatgttgtcggctgatagctttgttttcagcgagatgttcagtagtgctgctcaatggcctgagcctcagcacagcgggtttaatgacatgggctttgacccaattgcaagaggaggatctcatatttccttgtaatactttcttaggctagaaaatcgatctaatgaatagctatgactaacgacgtttcttccaatgtaatatacatcctttggcgaattacacttcgctttacatgacggtagcttcatgctcaagtagacgattcaagaattgtcttctaggtgatacgactgtttggactatgcagtaagttcgacctgtgcgtaatccattggactcacagagattggaggagcgatgcataattgcttctgtgtatcgagaacctctggagtaagtgttgcagtttccaggtaatacacgctccagggggcgtctccttgtgtgactatctgcatagcaattcacatcagggtggcccgctcgctcggaacttacgttatttagttaaccttcctctcatgcagaaataatgaccatgatcggagatttccgacggagatttggcgcttatatgctaatcagtataccaatcacagccagtaactttttcggagaaaagcgatgctgccctactactgtggagtagatagatagacagcttcgttgggaagagaatttgcagacatgtgatgactgtatcgctcctctttccaatctacataggcaaattacttgagtatatagctacccctaccagttgaataaggctctcttggccactattcttctatacggagaaaattcatcatggctactagggagtcaattaaactctttaccaatcgaaactgcccatgtatgctctccgagtccatttttgctgcagaatactgacaatgactcgcaggggcacaccgtgttcatattgtgctggcagagctgggtctaccattcgaggaggagatcattgactacagcaaacctaggcagcccgagtatctcaagatcaaccctcgtggacaagttcccacattgacatatggcgaccatatcatattcgagtcagcttttatcgcacagtttctagctgactcagtcacatcaacgcacttgactccacgcactggagaagcccaaggagccctcatacgccacagaatcgccttctttgtcgaaacatacttttcaaaggccaatatctactactaccgggcaatcgaagccaaaactgatgaggatgccgatgagctcggcaagcggtatgttgatgccgtcgtcaaagaggtcgagccactcttgcaagacgcgaaacccttctttggtggcagtgacaagctgactatggccgaggtaattactctccaacccttttgaaacttcgtgtttggttatttccccaggcaaccgagatttggaaaagctgaaacggcttgtaggttctgactgcttcctttatcctgcggatttccacgctgccgcataccgaaaatgcgccgttgccaaataccatggtagctggcatggaagaaaaggcgccaaaattcttcgcgtgggcccaggctgccatgaagcatccgtctgtgaacggtatctataacaaagacggttgtgcggccgagatgcgtgatcgacgagctaaagctcgtggtttggtatgattcaattgctgtttgtcttgaaaaggctgttctgcaaagttttgcaccagccaagatacagaaaagtgttctgtacaggctattccgccatcctgctatggattcaattaaaacaaatattgcagaaccaactgttaattctacactctgtccctaattaatttctttgatttgaaaaagtagaacacaccgcatcgctaggaaaagcaaaaatgtacctctgattggccacattcacttggaatacaagtggttttcagataaccaacatgttcccattgtcgaatttcgagcctcccagcactgattgaactttgggttttctttaatgagtacctcgttacgcagtacgtggaaaggggataaatatggatttcgcgcgatggtcttcagtgtcactgtgctaggaggattcatattcgttttagaagcgtattattcaatgttcacagctaggtgctttttatccccatgctagataaattcattggtatgtatacccatatcaacggcgttgagtcctttaaaatttcgagatgttgatctgaaccaggaactcaggtttgtgctgacctgaatgaatcgagttgaacagatttctacttcctacgggtctatatagcatgatagcatgtgagcagtatgacataaagaccaaatttcattgtaataccactatgctagaagcttctagcatagacacttgctcaaagaataaagaagcacaaagaagacattcgctgatcaaaggctgtacatggtgtcaaggctcatatcgccttcaagcccatttgtagtcgctccctcggcaagaagcttcgccttcttttgatttctgcgtttgagaagaacccagcatgaggcatacagaaatccagcaaccactgtcaaaccagcagagacagcgttgccagttatataccttgggccctgctgactggggtatagttgggaagaaaccagtgaagagagatttgctatagaatatgcgatgggcattccaattgcgcgcttggagtctggctggagattgatagatatccatgttacagcaagggtggaaattggatagagtcctagacaaagtttaggtttagacttcgagtaaacatctgcaacaggctagatcacacttacctaagacgagaatgaacattcctgtataaccagcagcaccacttgctgaaccgacacagataagatatccaattacgactggaacacagcatccgatgataaaaacaccccgtcggctgattctgtcagaaaagtacacctgaataacaagtgatatcaggccaagaacgtaaactgggatagttaggtagttgaccgaaagagaagggaatccaagcccagaaagaatagtgggtaggaaaacgttgaatccgttgatagaaaccgatgaggtaaagaaagcgataccaagaaggtagacaaaagggtctgtgagagcgatcttgatccactttcgttcgaatttctcttctcccctgcgcaaaaagtctcgatctctcttaagacgcattatttctttttcctcgtcattcaaaaaccacgctgtttcagctgttttcgggagacaaagtaagccgagggcgccaacaaaaatcgtaacgcagaattcaacgataaatagccatctccaggctgcgagaccacgttgagttcccatggtctgcacagcatatgcaaaaagcccaccaaaggcacctgagatacacattgcaagattggtcgacatgatacgctttcctatcaagcttggcgggtagatagtagaaaaaaggtaggcgaagctttgagcaagacctgcttcaaaggaattcaatagcatgcgaacggctatagcctggtggtaagtttggataaaagcagttccaagagtgcagaagctccacaggatcaatgctgctcccagaggcttattagcaccgaaacgcttgacagctaaaacccaaggcacttcgaaaacgatggtgcaaacattggccagcagtgtgatattgccaaattgaccatccttgagtccgatatctttatcgaagccaaatactctagcattacccatctggtaaatattagagagtgtactgttactccgaactgaggctttactcacattgttctggtccaatgaggagagaactaggaagacaaccgagaccggaaggacaaatttatcaaatttcttcaacacagctgcctctttctcagggtcgatatatatttccgataaaatctcgccgacttcatggttgatctcttctggggtcttcgcatcaccctggagggaattcttgtcggattccggagacgacatagcaaatatttgcggcaagtcacgagtgggaagttcaaaatattttctctttgatcaagaaggagcaagatgtccatgggttcttccagttgtatacctaaataatatatatctgtgtactgtgatatagatacgtcgatctggttaagataaggatcctgcaacctcggcagctagtctcgagacgccaccggactaatccgactctctcaggacgaaaaagatcatgagatcaaagatatatgctaggtatatgtatctaactcaatctaagatttaggtatttgttgggataatgatatgacaaccgaaattccttgcaaagcaaggtcacgtgaatcaggtacttgcgaactaacatgaataggagactttacacatcttcaatgtcatcacatcatctataccataggggataatctctgatggataataaaagcttaacgacattatataggcatcggacctttttcgtatccctttataatccgatcggcttattcctcggcttatgccgatcgactcgttaatctgcattggattagtccgaatcgggtttgcatcatgatgcaaaacctccaacagcaaaggtcttgccatcgggaggtacttaaccttgggtgaactgctgtcattctcaaatacatccttttctcaactacaatctcttttgcctggctcacttttaaagttgctaagaatccatcatgcagccattcaatcttactgctactgggcacaacctaaactatctccctgaatatatcgcacgtcgacatggatttttcgaggagcaaggactcgatgtcaaagtttctattcccaacccatgggacggcgtccttgatgcactcgctgatggcacagccgacatggctcttggtggcatttgggtgccggcaatgtaccgcaaccgggtgaaagactacacggtctttgcacaaattgcgaatcgctgccctcttgccctgctctgtcgtagcccggcaaaagacttcaagatcgcggatgtggctggaaagacagttttgatgaagggtatcggcggagccagcgccggtctattcttcaaaatgtttttacgcgagaacaaggttgaccaccgatctgtcgattatatccaggatctcgatgggaagatgctgggcgagttgtttgaagggggaatgggcgactatttcgtgacggacaacctctcggccaaggcgatgagtgagcggaatcccaaaatctccgttgcgatgcaaatggtctcgcaaggtgaaattccatggagtgtatactaccaggagaccgcgaccatcacgcccgagggccttgatgcacagaggcggttctgcttaggcctccgtaagggtatcgaatgggttctggaacatgacgcagaatcatacaaggacgagctcgtcgaactcttccccaatatcccagttgatgtcgctgttgctgtgaccaattctttccgtcgcgatggcatgtggacgacaccaatcattccgcgccctgcttttgaccgttggcagctgggacttgccgaagctcagctacttgaggagcccttcttatacgaaaatctggtcaatgatgggcctgcagtgaaggctcagagtgagatgatttccttctcatgaatctaaaatggaagtctttgataatttaagactcctaagttgtctcatcttgggactggttttcgtacataagattttttgaatgtgaaatattttgaaatgaaagtattcttagaagacgagcatttatcaggtcgaaaataagatgaggaggttcatgatagatcctcgtggaaaattctagattttcgctagagagtaacgccgagttggtaaattctgctactttgaagctctgggttgttgattcagtgagctcaaagcagaaatttagtgatcgcaccgatcctacgtaagttgttttgagaatacgtttaatacttgaatacacgtaaaagcaaataagtaagacagatgttttgggaagataagaagagaaatgtcctttgtcggaataagccttaaaacattaggaactaaccttgaaactaggtgtaccacctcgcctaggtactgcccaggtgttctcttcattaaatgccacgatgcctagaagtgtgaaaggatgattttctagatctttgttggtattgtttcccgcatcatggatgtaacactgtctaaagctaagtatactagcgtattcatttttcactgctgttcatgcttatgcgtagcgtaaagtatatagtccgagacaaaatctactcatgcagttggaatagtgacataagatttcagtgatcacgattatatgtaagtccacctactggttctgtatgttctttaagtcttttcatatgtatacaaagtagtaaaaagcatagttaaaccgcaggacttccatgtatagccccgaggtaacctgagctatgaggtcagcgataagagataagcttttcctacaacacccctcacccgcatggaaggctctcaattctccaattcccccgaaattaccaagcgaaaaaaatgagcaagccagccgacgggaaagccgtgataatagggatctccgggccctcgagcagtggcaagacaaccctggcgcggctactgcagcgagtattctgcggggtgaatctcaagcccaaggacacccatctaaacacgttcataatccacgaagacgatttctacttcccggacgacaagtatgtacacctttacttccttctcaatacacatacccatcttaagtgaaaacaaccctccaaccccatcctaacccaccccagaatcccctacacaaccacccgcaccggcgcaaaaatccaagactgggacacagctgccgcaatcgacatccccttcctctcgcaagcactccactacgtgcgcgaaaacggcacactcccgccgcgcctccggagcaaggaagaccagaactaccagacgcattccggcgtgtcggacgaggtcgtgcagaagttgcgggacgaggttgatgcgcggttgcgcggggaagcagcagcggacagcacggcgaacccgacggtttcgttcttagaggggtttttgctgtttgcgccgcctgggcaggaacggcacgtgcttcgttctgttagtgatgctattcatcttcggctctttttgccggcgccgtatgagcttgttaaggcgaggcgcgaggggaggaatgggtatgtgactgttgggccggcgccgcaaccgccagttcatactcatgatactgcgggtgcgggtgcgggtggggaaggggcggggggaaagacgaggacggaggttgatcttgatgctgaggatgatcggccaccgcagaatttctgggtcgatccgcctgggtatgtggatgatattgtttggccgcagtatgtgatagatcattcttggttgttgattgccgaggatggagataaagaggagaagggtgagagcaaggatcaagagaaggctgatcttgttcggagggttggggatgggactagggctaggactgatgttggggtcgaggttgcgccgggatatgggagggaaggaatggatgttgttttaaggtgggctgtcgagctgattctgggatattatttagatcagacgtaggtatagagttatatacatgaactagagtaatatatttctgttgtctcttagctgcagtgattgcctccttcgtagctatactaagctaccttatcaaagattgattcgcaattagccctcgccatctgacaagacagtgtggcgcgtttcagaggttaaatgctcactacataaggataatcggggtaagtagtgataattcgaggtcaaacatggtatggcaataccaccgttgttgaggtcattcaactcaacaaggtaatagtatctccagttcgctcaagattaggcttcagtaaacaggctaccaaattcctctatagacagatacaggacacaacgagtaaaatggatgttagaggctttaagtttctttgttctcgattatccctctatacactacatcacaaccaatacgtaagaatgtatcatatactcttccctaattaggtatgcctttaaacctagttctgcctctattctagatgccgaaaacaataaaaaaataaaaataaaaaattctctagtcatatgggccgaggtgcccgaggtattgcaagcagttgagagtatatcaggattacaagtcgacaacgttattcgggaggattggttccatcttgataccgaggatgatctccgggtccatccgcctaggtatgtggatgacgtttttgaccgcggtacgcgacggatcatctatccatgggtgcttggttggtggttactaagggtcagaggatccatggataagaagagctggatccagggtctagcggagactaagcttattcggatggttaaggttaagactgatgttactactcagatggagtaaatataactacgtatacagtggatcatcaatagataattgtctttatgtttgctatctgctaacggcagcgaggctgcacctgattctgcggtttcccatcatgtcccggtattctcccgttaacgatactgaaccatcccatcgtcgaaatttactcccgcgcaattggtcctcgccatccaagaatgtaatcaatgcggtctctcagagaaattggggtgacctcggcaggtgtggtattgacatgctgctgaacttcaggttgaatgggctcaagctgaagatttgactctgccaggacagtctccgtctcttgcaccacatcagcattggtagtaagatttcctgcgtagttcactgggccatagacatgcgcttcgcgggagacatggctgagcaaaaagtacgacgaggagatgatgtggacagacgccaggaaaacaagcaattgaaaaaagaaattaatcagggtccataaggtccacagaccgcgtacacggcgtgacttcgttcgctcagcgactagagtctcgaaaactgtcgatacaggagctggagtttccgcaacggtttgcgtacttgtagacctcgaagctggaattttaccaaatagaggctcagtcagtccaaacttgggaatggaaccatcttggagatatggtggagttatctcgacgtcgagcttagaatggttaagcccgggaacacagatatctcccaattgaccacatgaaacttcgcacctagtatcagcattctgatactttgaaggtacagcttcctgcttggtcaattcataaccaggggcataaatggcataatcttcttggagaacagtttcagcatcactgcagctgagcgtggtcttgatccatggcaaccaggtgacagccttgcctcgtggcagcttgatttcccacgacaccgtgaacatgtccagagcttgagggatgctgacaatattgatgcgcgagattccagtcccatctgccgctggcagctgaatagaattgatcagaggctttttagatgtaaaaacagcgtcaaactcgccgtccgggccgccatgcacaaaaatgcagaatttgcactgctcggcccagaagttatgattgatgagatcgatggagcaagcagcgttgtatttgatcagataggacgatgggtcgccagcctctgccacttcggcccgtatgagtgtgttgactttgtggtccttgagttgtccgaagcattctgcatcgcacttccggaacggaatgacgaggtttcttccaccgtagaactgggccatcaagcagctttccacgagcgtatgtcttttaaaagacgaggtcatgaattccattccctgacccgggggtgttcggaagtagagataaccagactcggactgggcaagtcgaggcagtccactaacgaccaactcccaccaatcccacggtttccctttctgtagcctgaccgtgagcgaaatcgcgatttggtatgttgcagggtagatattgggaggggtttgcaggtaaagaatgtcattgtccaatacgatcttgggcttgtgcttttcggcaatttctgcagccgtctggggcagagggagtccatgacatgagaaaaatgatgccgatccgatggattcaagaggaaaaaacaaggtctcaatttctttgtcactttcttcggtgtcagaaatgcttccgtggcacacacaagtagaaagtgtatcataattccgctgaagcaagttctcttcggtaagcggctcggtgccgctcaagtcagtcgtgctgagaggagtttctgcattgcaccaaggagagttttcatcgggctccggtacatttccaaccgccgctgcattgccgtttcgcgagagatgttccgatgcaacgttcggggaacctggcccatgactcggccccgagtcttgaggcaacggcatgttctccagcaccacgctggattcgtccggagtagcagaacgcctgtgagtacgagtggagttggcggtgttctcgatggtgctcggcaggtcgatgttgttcatcataagtttgcgtcgggtgccttggtactcatcgtcaggaggaatcgagtcaggcagagaagcagccttggcagatctcttccgaggtatcgcagagctcgggctacccaggctgttgacctgactcttggaaaggtcagagagggttgagctatccgagctatcgacccgagtgtgcatccccgagatattatcagtacgacgagagatacgccgagaatcatcatcccgcgaaccatcgtgaacaacgacgctcccaaaatcagaagcagagatattatcggtagggtatctctcggtctcatcagcatattcttggccaaaccgccaagcctctttctcaggtggagtgtcggtttcatagtgggattgggcttcaggcttcaactcgatgacccaagacgggcttttggtggtgtttggcgactggacattgagaattggtagattcaggtttggacggccgcaggtttgtagcttaattcatttcagatgacagtcagtactgagacccaacttgagggttggtttttcagcgttacctccatggagatcgtgatagacactggctcttctggaatgccactccagtcgcaccacacatcgaggttgctgagagggctgtcgttggggttcatggtgacgtccatggtaggctccatgagatgaaatggagatgaaatggggatgatgaggaaatgagaaagggaagatacacgagaggaaatatgatgaaaaacaaaaggatagggagtagagtagggagtagagaagtgaagagggagagggagtggaaggtagcaaacattaggaaggcacgtcaagatagttaaccatcccaagtgatgggtttatgcttattcgtatcaagttccacaacatccctactgtctatcatcttggaaagatcagatcatcaaagtcttacatcgtcaattaaaaaaaaaaacacgagaagcagcacttgcaattagccagtgatactgcttttaagggcctgtatatacaagaagggcttaagaataatctcacttttctcccaatcccatgaaagaaagacctcccccttttatccgccagcgcctgtaaaaataaaaacctttagccacccagttaaagcatcaagcataaaaaagagaataatgaaacagtcctcccggtctatcaagacagaaggaaaaaaaaaaagaaaagataatatcaagccagaacgtcgagaacgtcaagcaaatcattggggcgttccattcggggaatcggggtgatcgaaggtggctgggccggccacggagccaaatcgatcgccgtcaaccatttgagatggaagaataggggtattcgcctggttttggtcgaaataagcgcgtgtggatccattggttccttggggatagtcgcgattccgctgtagaggaggaagtatagacgagctagggggtaagccagttcggacatatccctgagccatcatccctgtcgaatccggggtctgtctcgggtccaaaatccttagctgggtattctattccactctcactggttcgcagaggggtgtcgtacaggagtaccaggctggttcatcgccatcagttgtcccacagcggcctgctgctgctgggtggatcggctttgaccggtaggatcgggaatctgggacatgggggctgcttgcatgccggctgatgattgcattcccgggtacatctatccaaggtcagctcaaagagcttccaactgccaggggggggatacgaaccgccgcataatcaggcaccacctgtcctgtggagtaggtctgcatggcggcaggcgtttggtaggtagctggctggccagcgtacatagcagccgttgactggctgtatggatccatttgacgggccattcgaccatccacatcatagatgccctgctgtctgccatagtcgattgaagtacgatgacgcttgactggcggctgctgagcgtagtacccataatctcgggccgtcggcggatagcctccatagctagatgatggaggaatctgcaccgactgacgctccggagatcgagtagggactggtggatgaaagtcgtcaggtcttgtcgatcgtttcctgcggctgttaactacaagctttcacattcctatgagttgagggacgtacaacatggtgcgaggctctttgcgaatgcgcaatttcacaccttgatccgcaaatgatcgggagaggtgggttgactccatcattccagggaaactcttgggaggggatactgcaagcttgtcagaacctgggttccagctctctccacgggagattcgtacctgtgaacctttctgagataacggtcttcaaataagacacacggtccctgtttgcttgttaatttgaatctggaccaagctcccgaccgttactcactttcgcatctcgaacaaggtaaacttcaggcgaaagtcgccctcaatcttgaccgagagatctccaaagacgaaaaagccgccatctacaaactcgtcagtgaattagccccactcgaaggccagcctgaactaaccgctgttgtccacatccttcaaccggtgaagtgacgaaactagggttcctgctaatgcagtcgacggtgcgacgggtacaggacgctcttctgttgagtcgtacagactgcagcacatgaagtagtacgggctttgcaggtaatgtctgcgccaaaagtcagccagccgcgcgaaagccacggtgaattgcacacttactgtgcgaggtaggtgccctcctctcgcacccggagctggacgatcgggggcggatcgataggtttgcgctctgcaagcgtgattagagtcgggttttcggccagttccgtgggcctccgctttacagaggactagctaggactaggaacgagaaagaaagaaagaaaagagcttccatacctttttccttgccccccgccacgcgggcccggttgggctgctggcgaatgatcaagtcaaagtcagaactggtgttgttcaacattgtcagtgggattccctggacgaccgcgtaagagttacgaccctgtcaaagtagacacgggaagaacgactcacccctgagcttcgcgcgagagagaggcgtcggagaatgtcgcactcatcaagacgagtcacggacaaacaagggaaggtggagagaacccccgaattttgaggttgctttgagagcgagtgaaccagccgatacgcagtgtcgatcctcgggaatacaaagaccaggagcaagtgatctgtggttttacaagggaaagagtgggaaaggaagggaaggaacgggtctttggaccgacagaaatccagtggtcagcgaagataaggagcgaagagaaaccctggacgagtcacgatgtcgtcggagaggggtggcagctgtagtggggtaatgggatttttttttccgtttcctcagccttcaaccatggacgagcagacaaatgaaggacgttggagaatagagagagtgaggttggttgaaggacggatgaggttgaagacgaaaacggagtggtgtcgtcagtttgcaagcggaaagagccaaccgagcgcggttccagacaaaaaccttaagcggctctctctcttgatggtataacggcgccccgagaactgtcgatatgccgaccgaaattggacgcgcgagaatttcgcagtaaattggggggagggaaaaaaattcattcaaattcagaaaaaaattcaaaaaaatcaattggatcacagccttccaactctctcagttgtgaacaaatcagagtcgagaatcccacaaaaaaggaaaaaatcgacgaaccccgtgggattcagctggttttgtttaaaagaaatccgaaaaaagggagaaaaaaaagggaaatgcaaagatacccagatattctaccaccgtagcaatatcttccaagggaaaagacctgagaagaccggaggtgataaagtccaagtgtgactgcctgcctggaggggaaaggaaaaaccaaaagaagaaatggaaaaagaaaaagaataaaaaaaagaatcgaaaaagaaaaagaaaagaaaaaagaaaaaaacaatttagcccggagaaggcagaaaagtggaaatagaattcagccaacccacggttgggcgaatggcgatccggatgcgtagtaaaccgctgcctctcttctcgttctcgttggtccgacagagaaacggcgaaccgctagtccgttagtccgcgtctgggttctttatgatcgtacaaaaaacccacaaggttggcgccggatatgcaggtgatcagacccggttttcttgtccgccgtaaaggtgttggtctaaacgccaggtggactcgggccctggtccggcgtctaagcattccagtcaaaagtggagatatgcacgatcaagccgcatcgcctatgtccggggattgctgctgcgtctccactcgatctcagtcctggaatcattagccatgttcgaataatatcaggacacctttcgaagcccacgaactgccccagctcggatatcgctgccgcttgtcaacgaaggttctaaccatggttgggcagcctttcttatgtcatcccgaaccaaagaatgtcaggccctagacctcccacaaatcgcttggacacccccctaaacaaacaaaaaaatggaagaaaccataccttttttcgtgccctgaatgctcctttcagtgagaaatccaatactcgaagatcgcgcgtgaattctttggtgttgtgcgtggatcactggtccctggaagacgcgaaggggctcagggcgaaaggagtcagtccgcgcgcgttcgacgactcaggtccggcacagtcacaaattgcgcaaatgatcgagatcccagtcacaatagcgtgtggcacgtcgtaaaccccgagagcgacggtcgaacactggtcgaacaccttattccgatccgagacgaagcgacacatgccgagtcatgatgcagtggaaagcgaggagaaagagttgagtcgaggagcgaaaaggaagaaccacgaggcagcgccggagcaagactgggacaagacgttttaagggggcaacaacggatcaccgcacagggcttgccccgtgatgcgtcacatttcctgacaggcccaagatctcatgtctcatgcaagctactgtatgtcgactgcagttgggggcgtagacgctggttggttccggaaatccctcggtcgagctataggccggggcagcgcatcagccaatgcaaaaacacaccgaaaactgggttgcagtcttgtggcttgcggcttgcgacttgcagcttgcagatcgcgtgtttgcgtgataaaaataaaccggtactttctagtatggactacggtgctctgcgccacactcgctgaccctcgatttgcggctgaggatgtacggtacttttccccctcttcagacatcttccaggtgagtttggcatcggtaatgcacaagtggatcccagatcctaaggcattagttgctgtatcttgccgagaacttgcattccacactctcataccggaccgcttcttccttatccttttctcagcatatgcaaaaaaaaaaatctcaaatcctagcttgcatgcagatattctcgagtcctgggagtggcatcacggcgcttgccagcatgtgatacggagagctgcaggtgcagttggccatgacaaccattcctgtcacagtccacctatctccgcatcatccgagctctgatagcaacgatcatatgtaagggtgagaacagcaagactcaattcgatcagagggcgccgatcagctcgacaaaagtccggccccaacattgaatcatgcagccagcgtgagatcgttattagcgagtcacttgactggagcagatgggacccgctgtgggggtttccgacagcactcagctcccgagaacagcgtctgcgattcgcttaactgatagttcccacggacaaaaagggggaagtcgaataaggagggggtaaaaaagtaaaatgaggggtggaaaggcgggaaaacacgcccagggtaccggcattgtttgctctggctggggttgaactgttggttcttatgcattgccttacaccccggcgacaagttcctgggaatgcagtcgataggcccgaaaaaaaaactcgcagccctagatgcatatcatgatgcgacaagcaagccgcgctgggagcacgacctgtcacttccttttgacttccgggattcggctccggggccaggacagaagtcccaactctcgatctcggtcatggcggggaaagccaccatttcatctgctgcagagacatgattcaggtgaaaaccagcatgactcatcaagaccgataggaataattgggcgaagggttggccgtgacattggtgctaacaagtcgggagacacgaagagagaaaagagaaaagaaagaaaagaaagttcgagtgcgaaaaagcgaaaaaaattaaaaaagtgaccgccaaaaaggaagcgaatttttcgattttttttccttttcccaatttaaaagtacagcgcacaccctgacccaaatccacagcggccccgactgaaaaaaaaaccccccgggaatttgtcagtgtcgggatccaagctagttaacttacagactccggttaataaaaggacgaaaagaagctcaaaacgggacccgtggagatccaatccacaaaaaagaccaagtagcaacgaacccctgttcggtacttcaacaacacgaggtacggagtgtgccgtgagggaaagggaagaagggagggggggggttgccgcgatggagcactaaccaaccaactacaacatacatacggagtactcaagacggtaactgtacggagacgggagaaggggaaaaattccagattcacgcagacagacgaagaacctcacggtgaacaggtaatatatctgacagcggcattctccattgggatccagtggttaggcgctactgtgtttatgcttaaatgttggccctgcgatggttccgtggtggttgggcggtggttccatggttgtgttccctccctgacagctgtccggtccgtgttggcgccgtggccgccgatcttttgtcgatcggtgctttgtcgggactatacttattacttactatattattgcactgagatagttatcttgtattcctctttatattttgaatatatccttcaagatgctactactagtagttaattggttattacctgcgctctgtattggtcccaccgttcaccggtatggcctgaaatcctcccgtggtgggatactcgataactagattctgcagtgtaaccacgccgggaacccgcacatcagccacagcgttatgcctcgtccctcgtatatagagggggtctgggactacatacaattggctacaagatattatcgaggctatcaaaaatattttgttaatcttcttcctccaatttcggcatttactacaggtccttcctattcgaaaattttcaaccagcattcctgcgacaggactcttattcttggatatatcatgtgccaggcacatctactccgtatgtacactagagcaaagagctacccagtatttgatacattgacatgagacatgctaatcacacactgtactcattcatcgcagctagatagaaagtagaaaagaaacacccaagcaaaaaaactccagacaccctgctccgtgctggatgaaatccctcgaaaatggactagtaaatgagccagagaggaccgaagagtgccgcatgacactcatttcgtccccggacacccacttaacataacgtagcctttgaacaagaaaagaaatggaggaaaaaaaaatattaaatcgaacggtaggacaatgcagttcccggaaacacgtggaaaaaaaagagaagggagaaataagggaatcggaaatttcgttagaacaaacgccctatccacatgcgtaacttgctttgcaggcaaaaaaaaccacgaatcgtcagcttcaagattatcatgtctgcatcacgacatccccatccacttcgtactcggcgtcaatatctgcttctgcatctgcgtctgaatctgcgtcggtgccattggtagtgggcatggccttttggccctcacctttggaagcagactctagctcggcgggaaccataacgtggattttctcgaccaaagccttccggactgatcgcggtgtcttggggttatcgctggatcggcgggagactgctgttccaggcgaccgcgagatggagttagttttctcgggggtactaggtgcttccgtatcgtcattggacggctcggtagcatcaatgccattcgtcttgacaggttccttgggagcagcatttccattaacatgctccggttctttttcggtaccttcttcgagtacaggagccgtgtccttggcattctcatcaacgacagtttcttcctcgacaactccgctctgttccgttccatgaccattcgcctgggtagatgttgcttcagctgcgggagagtccgtgagaatagagcttctcccacgacgagtgctgcctccgggggtgaccattgccagcccggagggtcgccgaggtgtgccgcgaccgccattacgggcagccgtgggtgtcattgacatgctattgattttggtgctaccagatgggcggccaggtctgcgtttagggggtgctgcaggaggcacaggaggccaaagttcgaaccgggagggtgggattccagcggcggggttggggattgcaggtggttcggggttgaacgcagaatggtgggagccattagcattaggccgcaaagccaatgtggaaggcggtccagcggagtttgcgagagtgtttccaaccgacgcattcatcattcgaatattgcgctcatagtcggtcgctcttgcctcggtctcatcttcatcttcgtccgggtcctctcgaggggcgacggtatgaatgggagcacgatcgaaatgagactgattactacgacccataatgtaaggtgtccagagcagcgcatctggattgagctggacgtagcccttgttttcccagccactgatgacctcgttgtaatatttgtgatcgagacggatggcgtacgtcttggtgatgggatcccgcacgagagctcgaagtccctccagggcggatacgatatcatctgccgtcattcctgtgcgatcagacagatctgcaatgctgacaggcgtcttcaaatcacgaagttggtatgacaaaatcaatcgccaatagtttcggtacgacaccagacccatgtcggagagaggcttctcgggcgatccatttttgccttcgatgcgagtaaggaggtatgagaagtcgataaggaggtttccgtagcctttgcgttgatggataggcagagtaagaatgcaggaaacgttattcgctgagcttggacgtttttctttactgaagtagccaacgaaatggcagcccaaatcgtcatactcagtcatgacatagaataagaatggctcaacgtcgtagtaaagagtcttggagcctaggaaaagtttcgcaagaaggcacagattttgacagtacactgggttcttgcgcccatcaacttcgaagattgagatcgattgatctcgataaatctcatcaccgggggggtgcttcgcaggacacttaagtttatggcgccaggcgacgaagtccgagttcatgtacttgagacagaactcgcaaatgtacagaacacggttacggctgtattcctccgggtaaggcgctgcataccaggtttcgatttcatagccaccaaagttgatagacttgatcttggaaggaggaccggaaaccttttgtgatgcatgtgctgtggcctcgccgctgagttctgcttccttcactttctgttgccattcatcttcggctttcagacgcgcctgttcgaatctgtcgcgatcgaattgtgtgggaagtgtcctggatgtatcttgttcgctttcagacagtatgcctccgtatggttttgatttggcgtcgtctgtctcacggtcaaacagagtcatggagttataggatattgggggaaggggaacgaaatgtgcctggggttctggggccacaggtggcggctttggtgctctcttcttcttgcgttgcggtcggatttgagtgcctgttattttggacatttttgcctcgtccagccggaacccaataatcaattttccaaactgcctagttaccacgcggcagtgctctcggtccactgcgcgagttcgtctcacgcgtacagaacgtgtccgagcaggagattggacatcaccatcagcaatcgcatccccctccaaggccgcatcattcaaaattgggttatcggagcggaaagatgtttgtcgaagtctctttcgaagcacaggtatgtgttcttcggcctcgattgatgaggcctttcgctttcgaagcgatcgcgagctattgagcatctcgtcgtcaacgcctgtgttgaagatagaatggaatccctcgtcgtgtgtgccagcgtgcgcaggcagaagctctttgggaagggccgaggctccgagtgtggtttctgtcgttgtatttattatcgggtcaggctctaaattgttttgaacacagctgggacacctccacgggcctgtgttgatgttagtgcgtgtaaaacatcggagcgggataaagcagagatcgaagagcatgtgtttgcgtaccatccgtttcatcaaatgcttcttgttcccgagcgcattgccgatgggctgttggggtatcgagtcagtgatgattcaaaataaacagataaagggcagggcaagcagcgtaacgtacagtgatcaccacaaacaacacaagtgagccattcctcaaaatcttcgcttggatcgtgttcctcgtcttgactgcaaaccctattggtccgttagtacatctgattatgcgcccagtgcggcgagtccttccacttacaagcagtttgaaccactgcgaatatcagtctcgacgtcctcgcgaccattgctctcagcttcccagtcttcggcttctgattcgtggtcgcttgattctggttctgacgcgtcacgttcatttgcctcaaacccggggtcggcatctgcatcggctgtctcagactccgcatagtcttcttcagaacccgcgtcatcgtcgggtagcttgacagctccaacaggttcagccccatcattgtcatcatcatcttccccgttcaacttgatgctgccgttctttccatccgcagtttcatccgggccatcctcatcaacttctccagtgtatgctcggtggacggcatcttgaagccgttgatccatttcatacaagtcagtctcttcttctccctccgcatctagatcgctatcggccgggtccacaggcgggtcaagtttgcccgattcatcgttcgctggcggcaccgtcgccgccatagtgaaagttaccgccaccgccaggttgagcacagtagtgcttattgtatgcgctgaggctaactggggtatattttttgtgaaagaagcttagactgatcgaagcaccccgctgacgtcggcgctgatccgggggtgcatctggatcaaaagcgggttcgaggctggctagagtggtaccgaagatatttgcgaacacaagtatcgatcgggattgacgcttaaagttttcaggcgcaaagttgaagctaaacaaacaagaggtgtcagtctgcggctggagtggctaggcatcgcaagcgcgtcgcaaaacagagaaaacttaccccaaaagaaaccagtgcaatatttgatttaaaagcgtaccagacgcgtcaactggcagtccatacaccggggcctgtctcttttacaatcgaatgcgatttgcagcggccttcacgccccttgtcctgtgagtgtcgttgcaacgtgctgagtcagcccaggctaaaccacttcgggcgggggagacctcaagcccgtcgctgtaggaagagacgctcccctccacactctccgcgatcgatctactctcctcagtccgtgagaggctttgtgactcctaattctattttgatagctctttccgattatctacatacccatacaaccgcacaccatgggtgtcccttttgaggctctgattccctatgggattatcatgaccgtacgtaccattggtcaatgcctgccgagactatagctcaccaatcgctacagatgtttggtgtgactggctacggtctccactatgtcaagcgttttgccaacgatggcaagaaggcgcgctggaaccgggacctgtgggatagagtaagtgtttcattctcgtcggctgcggtcgggacttagaggcacattagctaacaatttcacagcaaagtgagtgattatgagactatcggccgacccaaaagcgcctaggaaaatcatatgagactaatagcaaccaacaatagtgatggagagagacctgcgcatcacaggctcattccgtgggcagtccagcaaccaccaagcacccactggatttgaagtcagcaacccttggaaggtacgaataacagatcccctgtccctttggttccaaactccgtgcagaaacgctgacccgagacatagatcgagaatcggatctactagtttcaaaatgcaacctcttttcctttacgttcaatgtctgcgccttccttaccccatgatcatacatatccactgcaatttctctagaaacgtcgttgtaccatatcatttgttctcttgggtttcctagtagtccgctcagtctacttgagctccgaggtcattccccgaataccttggatctcactctcacggagatgcatatcgaaatacttggccagtgcctcgacgcggtcctcttcggtctccagcacctgcaagatctccgtttgcccgcgcaatctcatcttgacttctttacccgacatgatgcactgacctacgatctctgtgccgcttgggcccaaaagcattcgcatgcagacaaagatctgggtgaaccagcttgttcggctctggctggattcgaagttcatgacgctgaaatcctgtggtagaaactccatatcggaaaagcagatctgtggcaaccacttgctctcagggttgtatcttgtttggtaaatccagatcttttggctagagtttgtgaactcagcaatgctttctctgacaatacgcatctcagatggtgcgatagccgtagcagtagcaccttcttgaagtaatagtggagcagtggcacaattgtttccaaagccgacatcaacctatccatatccgttagcatggttcatacactacagtagaccttcataccataccatgtacttctcccctgcgatgatcacaatcagaaccatatgtccacttcggatcaatagtgtcagctctactgggaatactcggaatgctaaaccgtcggagaacttacaatggcagatataatccatcatccactcccttcgccgccgcatgactgactctacctccagtggcgtaaacaagataccccagggaccgcaagacaataaagaagatcccggtgttctccatgcaatatccatccagccggcgctccaccatcttctcaaagagacattccgggttcagagatatagtatgatgctgcgagtaatgcagcgctgaattgccccatgggatggcagtgagatgtcgcctttgcagctcacccagcgcagaaagtgcgtcattctcgatatcctggcggagatgttgaagaagattgccctcggattgggcggaatgggagtatctgattcggttcaagtataactccagctgttgatcggtatacgtgggtttttgtgccattgatggggttccttgttggaatttgtgtgttcaagagatataggaactgtctctggccattgagagtcggaattattcgattctctctcgagaggactagttatgtatgtcattggtattttgatgaccaatagtcttttccccacactttcccgcacatcattgcctccacgcgcagcttatatagtgtctggctgggtttgtgcataattcattttgtaggtgcctacatacacttttcagtgttatccgcctagtcaatctgtatagcttagaatagtgtatatagaaaaagatgacaaggcacattctatacaaatgaacagacataaacgacataactatggatatgcatgagtaattccaacaaatatcgcaatggaaacccgagaccctgtagttacagtactaataaatctaattttgttctgtttctgtacatatgacatgtatattgttccttgataccccatgtttcctgcaggttactgttatcaatcacctcggctatgaccgccgcttgtgaagaacataattatccagacataattaacaaatttgtatataagatatagaaaatagaggatttgattgttactgctctctcaatatcccaagactaagcaatacataggcttgtgaaacgtacctttacacgctccgagtataaatctccgatgatgtagtattcatccgatatccggacctacggacatgtggttcgatcagcgaatatgaacctttagctcatcacatttctctattacttcttgtctaacctctgctttgtacagtctaacgtctatacatattccaaacaaattccccttcctactgtgaaccccgcatctgaacaaaatggctacgctaaacgagcaacttgcgacattgactgagaactactcgccctgcgatgtatgccagcgtttctttccataaaccgtcagacgatgcatctaacatcctaatttcccaggtatcagacgccctcatcaagctgcaaaagacacccgagggcagcacagcacgagcaggctacctcgcagatctaggtaagccatcggcaaagcctctaactatatctccaataaccccacttacatctatcaaccagtgccattctcgcccacgacagggcggaatgaaacaatgcccaagattgcggctccggccacaacattcaaatttctggccaaagacgccagcccgccagcaatcgcaactgaaaatccccagaagcacggcttcccgccgggtaagcactgggtagatcacgtcggcgcatttcaagattcggatccctccggtgccggatctatcgttgtcatcgagcagcctgagggccagtactgcgctgtgacgggcgggatcatggcgacccggatgaaagccctcgggatcaaagccacggttgtgggtggccgtatcagagatttgagggaattgaaagccactggacttccggtttgtcgttgatctcccataggtttattggtagcgttactgattgattttcgcatggtggtagatctgggctcatgctacttctactgttggcaccaatgccgaggccaaggctggtgctcgtgatgtgcccatctcaattgggggtgttactgtttctcctgtgagttctagttcctgtgtgctattcgattgcttgatgatagagtgcagaatctaatcattagaatgcatttagggagatatcatcttctgtgaccccttggaaggagttgtggctattcctcgcgagctgctcgggcatgtgctcgagctcatgcctaaactcactaccatggatgagaaggccattgaggccgttgcgcagggaatgagcgtcactgatgcttttaagcaattccgctgatagcctactttcagccaaatgtatatacatataacgttaggctacggcagtctctatgtatatttttggtagtcgctttgtagctttttcaaatatctcttcacgtatcttttcggatgtatataaaggcaaaagcataaaccgtatagaggactttccgagtataacctctgaattgacgtgagattgatttattcaggtgcaagccatactgcaggcaagatctgatatggcttactgacggctaaagactgccgtaggtattgaaccagtaaggaatctacagcgatattattaccaaatgtatagcatatatgctggtccaatcttttggtattcgaagtatacaatacataacgagaaatctgtgtatccaaaaaagaaaaaaagggctaaaagccaaatcgctgtgcaaatatacaaccgaaactcaagttttgcttactccgacacccagacggcggccatacccataccggtaccgatgcacatgctggtgacaccgatcttccggtttgtgcgcttgagctcagtaagcaatgtgctgacctggcgagcaccagtgcagccaagaggatggccgaaagcaatagcaccacccttggggttaatcttctcagaaggaatgccgagctcattaatacaccagacacactgggaagcgaaggcctcgttgatctcgtaaatgtcgacatcatccttggtgatgccggccttctccagtgcaatggggatagccgcccaggggccgattcccatgagcaggggcttgacgccgacgacgctggcagcgacgtacttgccgatgatcttctggcccagacgctcggcggtggaccgcttcataaggaggacggcggcagcaccgtcggagatctgggaggcattaccagcgtggatggagccgtccttggaaaaggcgggcttgatcttgcccaatgactcggcggtgataccctcgcggacgccgtcgtcggccttcacggtaatggtcttctcctcgccagtcttggggtcggtccacttcacgtccaggggcgcgatctcctcgttgaagagaccagccttctgggcggcaagggccttttggtatgagtgggcggcgaaagcgtcttgggaagcgcgggtgacgccacggtccttggccatgttctcggacaggacacccatggggaccttgcagtttgcggcctcggggtggctctcgaggaggtcggagaactcggtcacggcacccggtctgtgtcaacttgttagccatagtatcgaatgatggaatgccagggcttgaagcatacccgtactgagaggacatgctctcaacaccggcaccaatgccgacatcgatcataccagcctgaatggcgttggcaatatcagcgatagcctggagaccgctagagcattgacggttcaagctcttcacggcggtgctcgcggggaagccggccacgagagcggcagcacggaactcggtagcaccaccaccgggggcgaggacggagcccacagcaatgtcctgaacgacgctagggtcaacgccgctcttgttcagaagagccttgaagacaccggcaagcagatcagcaccagcggtatccttgaagccacccttaccacccttggtgaaggcggtgcggagggcacatgtcacgacaatgtcatcggggtgcttctcgatgatagcggcggctcccttcttgccgccagggccgaagtgggaggaaacctggttcagacgttgctgggctatagatagaagttagcttgctgattttatttcgattataacttggaacaagccactaggcacaaagtattctgttgaatacatgcccatggctgttacgtccacagcacttaccgttagacatgacttcagtctgttatggaggtatgggagaggtatgaggattaaaaatagggcgaaagcgagaataataaatccaaatatccggggaagccttgatttataaatcaggcccgtggagtcggtggtatttcccctttggacgactgccgttactggccgttgtcgcattctgggaaagtgccgaggtccatttggccgcatcattgttgatccgtggcagtcacgggatctccgactggtggatcgtggggcatgtgaaatcagatatcacatgcgaaggttttgcgacgtcatggtaagtagatcggcccgacataagatggtgcataatatcgatatttttcaggtgttgtttgcacaaaaattatttctctactggtatctcactttgaataccgagtataacgacatgtatccacaattaactcggaatggcataggttaatgatttttaacatttttgtcctcatatatcaagaaaggaaagtttattctaatcacatcccctgatagctcagctggaagagcgcaagactgtaattgtcctgttctgcaaagaacctgtcatcttgaggtccctggttcgatcccgggtcaggggatttttttgtatttttgtgctacgtacaaactttgcctctctggtgtgattcctccctaacactactccgatccaacacaatgaccgcaaattcctatacggtcgcggatatcaatctgttgtctgaattcctcagcgacaatcaagtacaaaatctctccaccatatcccctgtcgactgcattgtcatatgcgcctcagccgttctccacagtgccgaggttcttttcaaggttcttcagcaaagaccaccatctcttaccaaagctctcgtactgtgcgggggcatcgggcactcgaccaagctcctttacgatgcagtgaaatctcatcccgccttttcgcggattgccgatgagatccaaggtctccctgaggccaaagtcctcgaacgaattctagacgagttcttcgatcgatctctcattaccaaggaaggatgtcagattctccttgaacccctatcaacaaattgtggacagaatgcttcattttctcgcaaagtcctcgatgaagcgggctttcgggcaccagccacttgcattatcattcaagaccccacgatgatgctcaggaccagggcatcgtttgagaagacttatgaaggtgcccaacctccagtctcagttattagttgtccggtatttgtgccgcaggtgcaattgtctcgtggcggagtcattgagtattcagacatgtcgccgccgtcagagttgtggtcgcaaagtcgttttttggagctgatcatgggcgagatacccaggttgagggatgataaagatggttatggtcctcggggacgtggtttcattgctcatgtggatgttccaagccatattgaagcagcttgggctcgactacaagtggtggctaaaagctctagatagggatgtagagatatatattgcgaataacacagacggacatgtgttgtaccttaaaactacaaaaatagtcggccgcgtttgtggcctctgtcattgagaacgacatgatttagctagctcgatggtaggaacttataacctttgacatgtgtactgcgatagaataagaaccgaggcatcattatggagatcccgtgcatacatatacctgcaatgcaagtacggcccacaaccccactacaatatatgtactgtacaccgtggaagtcttgagtctagagtgaacttcttgactgtttcaaaggattaaaaaagaaaacactcagaaatattggaaagatataaaaaataatcccctgacccgggatcgaaccagggacctcaagataacaagttcctttcacagaacgggcaattacagtcttgcgctcttccagctgagctatcaggggatgtgattggttgattagcatatttgagcattatgaaccaaagccatccgacctggcttatacccgagttgtccactttaacttaattacaaccttggaagactcaattacttgtcgaaaataaagctatacccactcattggtcaaggtcggtgtatctagataagctggcggcaaaataccctccaaatcagctttgagttgaagcgccaatgtcctcgagtgccaccggtgttgctgtgtatagccacccatcacccaaaagccatgaaggcgtgactgcctcttccataagccacgtatctcgccctcggaatcaacaccccatgtggcgtcgatgcgagcagcaatctggcgaggcccaagcttctgcttactatcggcctcgccgtccacgctattcttgtcatcctcggcaccgttgggagcctgacctggagagcctcctaggatctcagcggcagtttcgcgcacgtttttatcaacaaatcccgtacaccagatgacagcatccgcctcaacatggctgccatccgagaaccgcaggccagtcgccgtgtatgcaacaggctcaacattagctttgataccagccttgccttcttccaacagcttggtaccgcccacatcgacatagtgtccaccagcacgctcgattaaattttgcatcaaagcacattctgggttattgctgtctaggacggggaatccagctgctgccagagctttgtagcgatctggctcctgtgatgcgaaatgcgaaaacaagttgcgggcgaattgggcatctatgactgtcgggattgtcataaaacagttatccgcgagctcaacgctggcatcataggcgcctaggctggctgggttgtcgacgtagtccactgggactatgtatgttggcgaacgcacgttcattgtcacttggagtcctgcagcgtggcaatcttcgagaatgtcgaaggctgtattggcggagccaatgattatgactgactggagtggaagtaatacggtcaatctcggttcttttcgcatcggagcttcacccaccttcgcccctttctccttcacttgctcggcattcttgtattgctccgaatgaatgctggtacctttgtacaggtaggaatctgctatcgatggtatattcactttttgggatgcaatacctgtggccaagacaacgtgtttagatattgctttacgttgaccagcaggagtctggaacttgactatccaccgcttagtcgatggatcatactctgtccattggatctgtgccgaggtgattatgttgagattgaaagccttgacatattgtcgtacctgggaagccagatcctctttcaaaagacgatggggggtaaggagcttctggtcatagtctggtttccagatttctatcagtcgctcactcggatatcaaggcatgagcaacttacccatatagggcaagtgacagagtgaagtggggacatggaaacgcatgctatcatagcggagagcccagttgtcccctgcgtggacattgcgctcggccatgacactctcgactcccaatgctttaaggcgcgccgcaagggcgatagctctttatcatccagtggcaggttagcatggatattgttcgaggctttttcgtcttcttacgaatttccacctccaattatgaagacttcagtctcaaagctctcaatcccaccaaattgtcttccgagagaatgaagcaaggtctcattctctttctgtatatccagatctttgagaatggtgctgagaacccaaatcttccactcgattatctcgttggcgcccttgaccggcaagagtatcacccttcctttgcaagtggcggccggtgagctggtttgaaaggcaattccgcagtcaatgaattgctgtgcaaaaaaagtcagctaccattcacccagctctatctccacaggtcatgctcacaagaactggcgtcgcttggataaatatggccccgccatcgaccgttatatctcccttgatggccctcagcttgttagtctccagaagactggcagcaattatgccaggtgatttgaatgtccgcaggtggtatgtcagtgctagctgatccctccaatatgcctggtccttccagaagcagtcttccagcgcccccgcatcattcctagccagcgcggtgttcagattatccaatacaagttgagtttgcttggttggttcataatctgccattgaagccggatctaccattccaggggcgagcagaggaagcgggttttgagccatcaacttgaggaggtcgatgcgcgggggaaactcgtcgcgcgacagggacatattgtctgtggatcgcacattagtcgtcaatacaatgcctacgcaccaatcttctaatgagaactcactggcagccattgttggattgaaataaatgatgtttgccttgggtgcggtatgaagattggacggccctccctgatcagtcgacctggcgataggggaaatgtcccgcatattggccgattcgtctatcccgtcttctgcagtccttagtcgcccgtatacgggttagtgcagcgatggcccgtgtttcccggtggaacacgaggccttggggcatggcagagtatgtctcccccgcaactttgaaaccaatttcatgccttgaatattacctttcaccccgtcgaggtgcccaatttccttcaaagaatgggccatggtacttcgtcggttgttaatgggcattgacctacataataagcagtcttcatacgagttgaaacctcaaatatggggccgtgcttggtgggggagccactaaccttttcgtccaagcttcaattgatcggcggtggtatgtccgctgtcatctgtgggagatcatcatttgtttgaaggcgcatgattgtctgtgaattgttcatgattgttccctcgggtcttgttggcttccgatctatttgaattggtatggtgcgcgccacctttttgttgtctttggggattctgccatccaaatgtgggttgtatagatatcacttggctacgaaaaggcatcgccctgcttgctacgagactataaacttcctaatactaaagcgtccgatatatttgccctaggatctacgctctacaagctagttgctggtaaggacctatatagcgaactctctggggctaaatccgatgacccggatattatcaaagctcaaatccgaagaaaatgtatggtagatcatgagattgaaacacggaccatattcctgatgtctcttattcggaggagaaatcacattaggttgttggagaggcgaaattcccactgcccaggcggcacttgattttgtacttgaaagatttcgtttaattcatacatgaatatagaggcaaaggagcgcaaaagtccattacaaccattccattccaaatgctccattcaatcaaacctaccaagctcatgcccgtgcagcccgtgcagcccgtgcagcccgtgaagcccgtgaagcccgtgaagcccgtgaagccctgaagccatgaagccatgaagccatgaacccccatagagatccacgtacatattcatagcttagagttataatttgtattcgtccatatacgacaagcaacgactcggcgaatattatatttaccgaaatgcaaggaccaagcagaatgaatggccataagggcggagtaagtatgagaagatgcacttgtaataggtgaatagaatagaaagcgtagaaggtttagaattgattcccaacgataaaagacattgggatgttagaatatgagttccaccatgctggtccttggagcctatatagtatgcttgctataccatggtttgttcatacggactagctagcccgatagcgcagccgtggccaacggtttcgcagcaatagtacggagtagagcagtaactatttaccggtgaagtcaaatacatcgtatcagcagtgagaggatacatatctaacagttttatatatattagccaacagaccgaggcgggacgtgggttgtgacattgaagagttggccacggactatagtcgcagatatgagaagtcagttctatacaatcagacagctggttatccgaaaaaaaaaaggaacgttggagagaaacctcgcagaaatcagatagcgcatacatactccatacgatctatacaaatggagtttgggaaaataaaaaaatcccctgacccgggatcgaaccagggacctcaagatgacaggttctttgcagaacaggacaattacagtcttgcgctcttccagctgagctatcaggggagtacatgatataagtggcaggattgtatattataacccaaaactacctaccagacatcgctcagtgattcacgatccatattcccaagaatcaccagccaatatacctccaaccgagccgaaagccaaacagacaaccaaaccaagcagataaatacccatgatccgacgcgccctaaccgccgcctcatcagcgcgcgcatcacccccaagcacattgacaagcgcctcagcctgcaagctccaactcacccggccatcatggcaccttgtacgcgacccgacccctcgccaagcaggagcatataattagaatgcctctcgagcatatctccaagcccaaacctcaagcaaaaaactaacagggaacccgcgccaacagagccccagcaccacccgcctcttcaccaccaccccgttcacagccttcacagcatcaccaccaaccaaagacccctcacccttccgcctcgccgcaaataaacccgactcctccccgccctcgttcgaagatgtctattacagccagtaccagccaaagcgccaatggcctccggatatgtccaagctgtctccgaaacaccagttccggcttgagcgcaagtaccggcggcgcgcggcgctcaagtatgcccggccgaagtttacgaaggctgttttgttgggacagtgggttgttattggatgtgagttttctcttgagatggggttagggttggaaatttgtggattgcgaattgcttatacacttgcggtggataatggggttggatttcgaggaaagatgctgactttttatgatacgtagttgtcattatctatgcggtgctatttatggagtgggagtcggatgatactgcattccatgcggtaagatatctctctggaaattatgctcatttgtgtcttgactaacattatttctagattcggaaaagcttctttgctggtctacagactgtattctccagtgcaccacctcctggcccgagaaaggatcagaaggataatacagcgtctgaggagagctcgtagtcgagtcatatttatgtctgacatcaatatattctgtaaaatattcaactagattccctacttgcacctgcagtctgccagaaaactccaaaattcaataagaaaactactgtcgattcatttaatcctcatatctgttcatcatttgtcgtgaagaaatcctgtcggaagaacaggcgtcgctgtaccatggagagaaggagaaagagacaggaaacatcaacagtctgtctctttctcgctttttgctccttcgcctgtgccaaatatggcttcattacatcatgtccgcaggacttctctggacaaggaaatgcagtcaacatgccaataacaccaagaatgccaaggcctgtcagaaatgacagacgaccagtaaactccaaaggtcaagtaaacaaaaaaacaccaacaaaataagttggggtggggctgcttgaggaccagccctaacgccgagtcatgatcgtatgaaacccaaagaaaaggatagaaaataaagacaagagaggaatgggaaattcgttaaatggaaccggggaattgcgcacccggttcttaaagccagctgcgcaggtcactcgacggggtaagcgggccagcagctgggcggttgtccgcgaagtctagagcaagctccagcctgggcggccgctcatcgaccaggccttttctaggactaccaggcgcaaccttcttgggtgatttggtgggtgagccaggttcgccacctcggggcgggccttcgcgtacaaaggtatatggccagccatcatcggctgcagctgcgacccaggttcgcaggcaatcatgcacagaagaatagaacttctccttgcaagtacgcagactaccacccatgactttctcaaaaccagaggcacgaagctcatcacgaagttggtttcgctcgtcagtggtaggcagcatggcaacgaggccgtttacaagatcgagatgtgctgcaagatagttggtcgcatcccattcaacacctccaacgtatggggcagctggaacaggaggacgagggactgggaagtgacgctcgttataaggacgagtgtctactggtatcttttcgccgaaaaggtcttccgacttggggaggggaatcacatttaggtgatgaaggaaaatccagaagacctccttggtcacgttggtaatctccttacaccacactctatatggtcgcgactggtaaatattcgcaatgaaagtcagtggctggttgtccactggtggcgctgggtccctcagataagaaagaatctgcctagcgcgcttggctcccagttcaccaacaggagcagtggagagctgcgtaaacagcaggtttgcaatgataccccgagtggtgaactcactgggacccttcttttcctcgtcaaagagcatatgcagcagagcggggaaaagttcatcctcgatggcagtgaggtgtgctagggccgcagatgtagtgcaaagagccttcagacagagcaatgcctggtgcagaagggtgtcttcgtgatcctcactgtagacgggttagccactggttaaaaagagggagacagggtacataccgccaggtcatcttcataatgcggtagagaagctgcacaatctcatccattcccccttcagtgataaagtcattgacccattggacggtttcgttacgtaggagaagacgcagtttgtgcatctttcccacctcaaccatctcgggcttttggatctctctcaggtaatgcacaaagtcggaaggatccgctgcggtatcgacagcggccgcatcagcaagtgatgctgttgaggcattggcggacagggtggtgtagacaccaacaggctgagaaagatccacagaccttggccgcatccggcttgatgctccactatcccttcgcaactttttgccaggcgacgaggggcctttaaaggagaagccgcggctcctagatcgtgatcgagagcctttacgatcctgagattgggagtcttccttggattctttgccgcgtcctcgacggctatcgttgcccgcgctgggaggagtgatattctctgtccgatctttctggataaaatcagccttgatattagtatcaagtgagcgcattttatctctcatgttatgagggatgttccttgcatcctaacggtaggttagccttgatattcaaatcggttgtatatagtccggccaacaaaccagcagcttctcgaactcgctttcgaggtccttggagttcagatgctgatgcacttcagcatctcgcccctttgcattgaatgcagagatagcagcctgtacacgggaaatacgcttgggctcttcttttggcatggtagacggggatatctttcgtggactcggtggccccctgctcttaaaagaggcactaccgccttgcccaatggggtcgctttctcccgaaggtgcgcgctgcaacccaagaatatccttcacctttcggtttcctgtaagaatctctgacttcggacgaggcttatggtcagtcggtttggcgagggagggttgggagtagtcgcagaagttgcgttgctggcttggcccgtaacccttgggcatatagagagagacctcgtcctctacggttcgcctcaggtcggcagtagagttcggcctcgatcggccaatagcctctttgcgaaccgaggccgagtcctgtgaccagactggggatggcatgttatcaatcaggtcggtcgggctgcggttttccttgtcgcgactctgtttcgagccatccttccttccccgctgggacctcttgaggatggccgagagactattagatgatttggcctttttgggcgacaggtcattctgctcaagtggctcctccgatttaccatccctccgctccatataatttctgagagacttcaacgagacagcgctcttggtcttcttatgaagggcacctttgctttccttgccgcccatctttggcgcggccactccgtggtcgcccgcatcacgattggggacaatctcactgagtgggtggtagccagcaatgaaaccaggctcctcggtaaactggaaagggatgctctcgattggcttgcatctcggcataggtcgcgcggcggcggcatcgtcggctgattgattccgtttatgggttttagacgacatcatggcccggaacatggactgtttggtaggggatcggttcgcatcgtcaaagatcttggggccagatgtactcgcagccatcgctatcctctttgaccagcaactaggtacatcttgttagcagatgaagtgcatgaacacctgtggaggggaacgggtagttgcagttcgaactcacgggatctgtgcaaacaaacgcagaatagaacaacaacgcggtcaaaaaagggaggtggtcaagtaaacccttcaatctcaacaaagaacaaaaatgcggggaaggggataggccgggtggaagaaaaatagaagactcagatgggcaagctgcggaatttgaagaatcaacggcgccttgctgccaacagcaaccgtcatcgagtatcaagatgttgatccacttcgcctcgacttagcgcatgagacgatccttggggttggctggatggaaggtggaggagtaaacaacgtgcgggtaaagaggttgcgaggggcaacgccgggacttggcggtgaacttggagtttattagcaacagtgcgccatatcgggtctgtctgcgctgctttctgggggctagacatgtcatattgcttattattgccattcatttggggttatttctcagcttgcatgtagtccttgcatctttttgtttatttgactgtgaatgtgaatgttgttgttgttattgttgttattactgtacgcatccggctagttgtatatattggatagatccttgattgacacttgatacatctactttgtaatgtaaattatatgaaataccaatagcatctactaatctacaatcgtatcttacagggtatagtttgctactatcatgcctctttgttattgacctatgccgatgccggcaagactggccccattgagaataaacccactatcgtattacatgcagttatgtcgaacgacgctcaaaccactttttcagatcttctgatcatattttatgcagttagtgcgttgagtggaattcgatccacaaccgtttgcgacttccggtggcgggtacttaaggcgatcctttcacttcaaacgcagacataaaagacgggagaagaatgtaaaactgcgatctaagcggtgctttgaaggatacaaagcgatatatgagagacaagtctggtttatgtacaacttagggtttgccggtgccagaacggcgaatgacgaacatcgggcattttcggactggcagtattccaccaagttacttgtcgcatatttacattttggtctacaccccagaattcaaggcttaattcaagataaaatcatcttccagagcagctaaacaccagatcgagccaaagccaagcctgcagcatgaattgcccctcgcggactgacgacactctcgagaacccaagctggaatcaaagcccaccgcccttcagcccagacaccactacacggaatgactttaatggtctcgccaattccagagtacatcgcagacatgccagttcggccaatgcagctggagatgatccactatgcatcgatgacagacccatcagtcagcaggatcaagaccccggaaaggaaaaggtgccaagcggcgaagtgaccgctgcggactcgggaggtgattcacccccggggagcagcgggtcacctcgccactctttctatactagcttgaagtcttctcctctgcactgcgctcaaacgctcgttaaattcggccgttttatcggacctggttttcttatcgcggtcgcctatatcgaccccggaaattatgccaccgatgttgcagccggtgcagacttcaagtacgccttgttgtttattgttctcctgtccaacctatttgcgattttgctgcagtccctgtgtatcaagctgggctctgtgactggtttgaacctggctgaaaattgccgagagcaccttccgaaatggcttgtgatttttctctacatcctcgcggaagcggccattattgcgactgatattgcagaggtaagtgtcccgttttggatagaggtcctaattgacgtactgacaaacttggaaggtggttggatcagcaatcgcgttgaacttactattgaaaatccccttggtggctggctgtgctatcacactagtggatgttcttttcattctcattttctacagacccaatgggaagatggtgggacttcgactgttcgaattctttgtcatggctttggtattaggtgttgttgtctgcttttgcattcagctctctctcgtaaagaaccagtcagttggtgaagtgttccgcggatatgtcccatcttcagctattgttcagtcagaagggtaagtttgttcagctgcctctgtacagtattcagctactaacgcatcttcagtttgtaccaaagctgtggaattctcggtgctaccgttatgccacactccctatttcttggcagcggcgtggttcaatcccgtcttaaggaattcgacgtcaattctggttacgtggagacctctatgcctctagggagcgccgatggcgaagtcaaatatcgcccgtcgatccatgcaatccgcggctgcatgaaatactcgatcattgagttagcgctgtcactgttcaccttcgccctgtttgtgaacagcgcaatcttgattgtcgcgggtgctgctctctacgatctccctggcggaggcagtgccgacctgttcggaattcatgacctgctctctaagtcgatcgcaccagctgccggtttagtatttgctctcgccctgctactctcgggtatctccgctggaatcgtgtgcacaattgctggtcaaatggttagtgaggggatgctgaactggaccatccgaccatggcttcgaagactcatcacccgctcggtcagtatcattcctagcatcatcattgctggagctgttggcaaggagggccttgacaggactctgactgccagtcaggttgctttgagcgtgatcctaccgtttgtctcggcgccactaatctggttcacttgtctcaatcgctatatgaccgttcggaccgaagaagcttccgaacgagacggagaagtcgatgtagtgacagttccgatgcggaacaacctattcacttcggtcgttgcggttcttgtttggattgtcatcgttgtgatgaatgtggccctgctggtgctggtgggactgggcaaatcatcttaatctctagatgctgatcctttccagacacgagcacgccccggattgtagcgaaaatagatccatagagcttgataataccccctctaattgctatattatgacacatggatggcatgagatcttcaaatatgatatgaggtagcttattgcaacttaaaataaacacccaatcaactccgttggctgcgccttgacacagaagaacacccagttgccgctaaacaaaagcacgctttaacattagtcttatccaagtccgccagcggcctccttgaccttatgctgctccggcggctcatcaataaactgcggtggagccacctcatcctgtaggaagctcggcatagcactctcgcccatgctgctctcaaacatagattcctcgcccagcgcctcaagctccgcatccaactcggcctcatcaacatcctcaggaatatcataggcccgggagatactctcttgaatctcattcccgacctccatcagatccgccatctcatcctgcatctgctcgatcttatccacgtcgaccttgccatactgcttcttgagctccttagtggtcgttttcatcgcatccaccgtcgtcatcacattcttcaaattatcctgcatcatgcccgcctgctccatgttccatgattgttgggagagttggtctcgctgcgcctcgtattgtttccggcgctgcaggaccttgagcgctttctgccggagggcggttttgccgggcccgtcgcgcatcttggcgattttagcctggtatgtggagagttcggcgttgagcgctgcgagcttgacatctatgctggatactcgagtgtcgacctgttgtatggttagtggggtaccttgaggggcggggatgggtgcctttgatcgggcttgtgcgggcatcgtacattgctaatagcaccttgaagagtcggcttggggcctgtggtctttgtgccgaatagtcgattcatgatggtaggttgggttggggtggtttattattgaaaggtggaggtgagggcaaataggcagcggacttgacagcgattccagaccgcgcgaggccagtgcttaataaaaccgcgatcggtgggccgagattgtaattaccaatagctggggcggagcacttctgataaaagctggcaaaatatagaatactggagaatcttgaattgtttgatatacaagtgcatgcgtatgacggatttccttgcacttcttggctttctcttttcgctttagtgctcacctcttgccgcttttaaatcaccgagtaaaactgagcactccctagttaccttgacttgatcacgggccattatataatcagcgtgatctgcccgctcactgaacatcatctaactgagcatcctgatttacccactagttaagtgctctctaagtatagggaggagcggcctaagtaagctatatcaataaaatgcgatgcgctaatcccatcacgtgcaaccatttctatttagatcgcctatcaaaaaaggactggcgtagtcaacgtgaccgttcattctagcggcctcaatcctatccaagtgaaaaatttgcagtagggctattcaatcgacctatcgttttcccatttcagtctatgcttctggagtctctcggaatacttcgcttaccagaccggcgatcccctattcgggctttgcactactaccagggcgagggtgattggatggatttccttgaaggttagaggtccaccctatatcaaagcaactagagtaattagttttaagaaggtgacgacgatgaattacttctctcgttaatgagcgcataagttgaaagcttttctgaacgtataacgtcatgtctttcgcgccatttctaagtaggtcgtaaaccgaagacaaaccatctattactaaagttctaagggcccatggctatttcattttaatcctaggaattctaagaaccacccgttttccctagcatttctaccttagatgatgccattttaaaagaggtacatatgtctagtcacttgctccgaaaacaatggtcttctcattcctccacatccaagttaattttagctagggccatgcgtgccgaggtttctgcgctaggcaggggttcaattccaaattaattagcataatcaacagtataacccccatttctcttatccacagcccttaaaggtcggaaggtgtgatgaatgaagtcaatatatcagtggtagatctaggagatcatgccgcatggactgtgcgctatgcatgcatgcatgcataggacttcagaagctcacgttccgtgacgataggggcgggctgcggccggttctgatcgctttgtttttttggtgcaatgaggtactagtccgtggttagacagaagcggtttgaaaaaaagaaaaaatataacaattaaaccaggaatttttgacggagacatgcacgaagtacaaatatacgtcaactcaaatcttgcaggagccctttagtctcctagtaccattataatctctccttatgtggtggataatctatgaacagcgcccatgtgactgaaggctacttggtcggatgaaaaaagtgctattcaatgttgcgtgccagattccttttaacaaaagaagtgcatttctaatcgaatatcaagtatggaaaaggaaaagaaaagaaacaaacgtgaaaataacaaatgggcttttatacccctttagggacaaagccctattctcgtttcccctagaaggaaggtacgactgcctgcgcaaacgaccaacagtataatcctaaacgggaaagtacgagtcctataagtgctaattgtaatataacccctaggtaagaatacatttagtccctaaatactggcttctcgtcatccacgtggtcgtccaatatccaatcgtcttgcgcggcctcgatccattcttataggcgcatcggtggcccgggcttcgctggataggcatcatggaattccttgatcatctccggagcattcttaaagttacctactgggtaccatacgggatctaggtcgtatcctaaccactgtacgcggtactgcagcttcctataatgctttcttacatctaggatcttttcaacttcccacttatcagtctgccctacctatatcggaggtagcggatccgtgtgttatcctgtaagtggttctatactcgctgccttccgcagcttacttaggttaaacactaggtagacgttaattgactgtggcaggtctaacttatatgcgttcccaaccttttcgatgatcttatagggtccactagtggtataagagagttttcgactcggacagtcctatagccaatccttcgtagtaataaaaaccaggtcgccaataccgaagtcctcttcgcgacgataacggttagcctattgtacctatagttcctatgactttacaatctattcacatatatcttcccagatctgttataactttaagagtcgatccgccgcttcttattcgttatacatcagtcctatacggtcccaattaaaagacattgctagtttataaccccgttcaacaaagaaaggggacctctttgttatatcttacagaagaattgatactacgaaatctactattagtaggtattctaaccagttgtcctagttgtattcaatatacagtctcaatcgctacactataaactgatttacaatttcgctctagccgtctgtctataggtagtatataatagacagtttccgcttaatccctaggattctatagaactctgtctaaaactcagagataaactatccccctcggtccgatacaatggtttcagggatccctataatccgtataacgttatctataaatagacgcgctatctgctttacattagtatctttataataggggattgatatcggtctcttacttagtcgattaataataacaaatactatattatagccgtatctgtcctttaggaaggaacagaaatccatcgataaatgctactatagtcgtttaggaatcggtaataggtataggagactaggcgtgcgatctctctaggtctttatacgtttatatactagacagttgtctatataccgctttatatctgtaacctatcctagctaatggtatcttattgtaataagcttcttaagtttctcgattctagggtatatagttaacggttatcggtatatcttatcgagtaactatgcttaaagatccccttcgtcggggacttcgagatagtcttcaaatagcagtaatctgtcttacactacctaacggggatctgtttcctatcttacagtctaacggaatacttctagcttaaggctttagcggttcgctaactagactcattcggttatatctaagttctatatagtcttaactagtagagggggggcctctgtatcccatatagattctatctataatagggatatctcgatttctaatatcgattttatttcttctccgaaatattccttagggagtaacgtaaggtaccgactgacatctatataagggctttccttctttaaaagaacgtctacaataatattccatttcctaggacagtatttaatcacaaagtagaactataagaggaacttactctaccgtacttattattaattcatctatcgtactattataaaatatttgagagactaataatctataaggatctcgaaacgttctatacaagagagcccttcaagttctagtcgccattcttagagtatacgaatgatcgtaaggagttccttatccctgattttataattaagctctacaggttatatagtctttaagaagaaggcaataggataccaaaaatcatcggcttcgtgatattataagaggatagcaccaatgactccatttaaggcatccgtttctatataggtctagaggtcgggattgtaataccataggataggtacagttatcaacttatactttaattatataaatacttacttacagtccagcgaccattcgtacactatatcatactatataagacgatataacggtttcgaaaggaaactataatccttaataaatcatcgatagaagttacagaatcctaagaaggactatattcccttaatcgttaacagtgtcttccagttcctaataactgcgatcttctctagatctactacaataccgtcggtactcacaataaatcctaagaacttagttttctatacagagaattcacacttagatagtgtaacctataatcctactctttatagttattcgaggacttctctaacatacttcttatattcttcgagtatcttgctatagatcataatattatccacaaatacaactatatagtcgtctatacagtctccgagtactatattcataaatcgctggaatattataagaccgtttataaggctaaacggagtcactttatacttaaacgatctatattaggtacagaatatcataagatcttctatagctagcgttaacctaatatagtggaaaccttggcagatatcaagctttataaagaattttgctttactcgttcgttagagtactttatcgataagaggtaataggtaacaatctttccttataattatattcaatcttcggaagtctatatagaaacgtagaccactacctagcttcttcactattaagattagtaaagcatacagagccgaactaggaataataaatcctttctcaagattatcgagaatatactattttacagcttttagtttatctaacaataatttatagagtaggcagtatcctagctatacttctacttcgaggataatattatagtctacccctaggcgatacagtagtagtttattggattttttcttagagaatacttctataaaattgtagtactcccgcgggagggtccttttaatcttatcgagttctatatccttctcaattgtagatttaatatcaataatctaatcaatttcacagagtaaggtctaaaagacttcgacatctttattaataaccatttgtattcgtaaacggttaaatcctacctaaccgataatactaatatctattagtagaagaacttcctttatttcttcctctagtatctccgttcaaagaggtactagttcgatttcgtcgttaaggttccattctatcttacactactctataacttgccagtacctatattaatactctcttataacagggtatagcttctaagtctttaggtcctaccgcagattacttaaggcttatttttcgaagaggcgatcgcatcgttctatatccttctagtgatccggcttaatttatacagaccacttaaggatcattataggtacgggtacagttaactagcctactaccttatcaaaaagggtattcttatctagccagattatacgataccgtcggcagttaaggaggatatcgttctccgcgaaccacatatatccgataatcatattatatcggcctagatctactactagtataggaatctactactagattcgatcgtctatacttagcgtaagaacgacagtgtatataataggtcgtaataatttactatcgaatcccctaactaggcactcgcggtctagtttataggtatataacccaaatttcttactaagtagtataaccagttctatattaataaatattaaactatctactctagtatctactagcgctaagattataaaggaatatctattataagtcagtcttatattaaatactaagctatctcgtagacctcctaaaagcttatatagatctagtgtatacagtgacacctattttctacttaggattaagacttctcctaggctcctacttttcctaggtctacgttatcctccaattcttcgagttcggttacacgcgattagttgtaggtctagttagtcgcagtaacagcgcttacagctatatttatcttcttcttcgggcactcgaatattatataccccttttccttacaataaaagcatcgaccctcctttataagagtctctcactctatggctaatagtccagataataaggcagtcccttcacgttttatatacagggtaaaactagactagttagcagtagtcccaactccgcttctaaacacagttattatataggtacatacggtaccctttacttcctattagagactaatcttataggacatactttagtaactctaggtaaaggtatcgaaaggaaccgtttcctaattaatagcctatataacttaactctgcaatagatatagaagtttcgaatataggttacacttacggttttctttaataaccgcggcttcttccgtaagctacataaatttagctaagaagtcagtaaagtcttccttaggttttatcttaagtttataataggccgtatacacttctgtacaacgatttaggttcgcaaagacagtacagaggtagacaataatatcttctgtatcggcgtatagattatttaaggtcacacttattcttaaggcaatatacagctatactttgcctttatatcggctttacacatatagtttccggtagactagtaacaggtaatagtcggcatttgctttaagcttctatctaataactatctcctatatttcgaaacggacttcctttctatcctttaacattagtatatcgggtatcttcatagacttctaactaatgactcctataatcggtatatcacttcgggcttagttcgtttcgctctaagtaagaacaaggcgataggcaaggtcgtcacacttacgtatagcgatatctctataggcggcagccttatcacgttcttcggtagcttggttacattctatcataagacaatctttctctatatagagtcgatcacattcttctataatttatctaacagcttcctcagacctcccgttctctaagatcaagacctagatttcgttatatatcatctggttatcatcttcgactatttggaaccgattagccagctcaaggaattgttccttactaggagtcgtgtatataatcttatagatagaaggagtcgaaggaccctcctcagggctatcgcattcaatattctcaattagatcctatatttcagtaggagtcggggttttagggttagcagcttcttttgtgagacaatccggtactacgggttgttttcccttaccgattgcggcgatccgttgtggtaggactatgactggtcctgttctggttggttttaggatgggtggggtgaaaccagactaggacaaatcgtaatgattatctgtgcagtcgtacggcttcagaagtttgggtttgggatgatacttgatattatattgcgtgccagattccttttaacaaaagaagtgcatttctaatcgaatatcaagtatggaaaaggaaaagaaaagaaacaaacgtgaaaataacaaatgggcttttatacccctttagggacaaagccctattctcgtttcccctagaaggaaggtacgactgcctgcgcaaacgaccaacagtataatcctaaacgggaaagtacgagtcctataagtgctaattgtaatataacccctaggtaagaatacatttagtccctaaatactagcttctcgttatccacatggttgtctaatatccgattatcttacgcggcctcaatctattcttataggcgtatcggcggcctaggcttcgctagataggtattatagaattccttaatcatctccggagcattcttaaagttacctactaggtactatacgggatctaggttatatcctaaccactatatacagtactgcagcttcctataatactttcttatatctaggatctttttaacttcctacttattagtctaccctacctatattagaggtagtagatctatatattatcttataagtagttctatacttactaccttttatagcttacttaattaattgtgacattcaatccagtctgaagcaagttcgtatgccgatgtcccggcttatgcaattgaaaaagatacgtctatgctataagaaacgttgcgattcgcccgggaaaggctcaatgtgctctaccatccgctgatcgagcccactctttttccctgaatataggagccaagactgcgtcaattgttctgtgtggggcagggccatacgaagaggggggagattcggaaaatcgcaggtccttcaattaaatgagcaattacaaatagccgagttcgtaggctgtagcattgggcagctatagcttcacgtagtagcattcttcaaccgagataactccacgtaagctgctcaacatcccaaattgttgcgtgcttgtgtcgctattggcttcaaaaggacagtttgctgatctgtcgggtggacacgaagatcttgatattaggatctgacgctgatctcaggtttagcctcggccctgtctcattaccggctcgggttggctcatacaagaggagaccattttggatcaagttattgagactgcttaagaaattccgatttagcaagacagcggtacaatagaattagaattcgaaatcgaaaacagattaagacactcacgctttctttcccagcgccccactccaatcgtactaaactgaattcgaccagggaaagtatgtatttctggtggatcgtcaaagaaaggtaatactagtaactaaggcgaaagtgggagctatgttaattctgataactagttgcacactaaagtattccacaagcgagtggccacccccaaatactatagtaaatgcgatatattctacatttatatctaaacagccgtatgtttatcctatctccccattttccgatagttataatatatcgtatttactatggtctttggggatggccactcgcttgtaaaataagttagctcgacccatcggcgcctaatcggaagctcaaaccagaagtactgtactcttttggaaactgtctaaagaaaatgccacagcaaaagaacaagcggtctacggagtacgaagtttcagctggccacgaacagtggggccactttgtagtagctcatggcgtcccgaacccgcacgcaacaacgcaacattatctggttaaagattctgattagtcgccggtcgagttatttcccggctagcctgatcaactgaataatggggtttcggttagtgtagtgagtctacgctgtagctggctcagcccgctacataaatatgagaccgaatctctcacatatgaactagatacagcttttcgcgctttccttttataaatcgatagtcaattctaccacaaggaaaatgaagatttgtttgattaattcgtcatacgaaggagttgactcccctttcgagaaggtatgtctaccctattgaggccttctcccagcatctctaacttcaaaacagtatgatgactttcccgaccctaatcggtatattccaaaagaccggcatgagtttttcactcgttacgtcaccaagagaaatgctgaggcggagattgacgagatttgcaaagaacattttgatatgttcatgaattacatggtgaatcccgacttttagatgccctctattcctggactatacttacagatctctttttcagtggggcatcgaaaccgacgatgtggcaggagttgaagccaccagatacctcgaaaccaagggtgttcccatcctcaccaacccatcgacatttctagcaaagaataaagtcgatctccagagggccgctgagaaaacaggtctccgtgttcccgaaaacaccccagggaaataccccaaaattgtcaagtactctgacggatatggttcgttgagtctggatgaggcatcaatctgctacacggagaaagaagtgacggatcgcgtggcccttttgcaggagaaagaaacaccctttggcatcatcgtccaggattatatcatcggccgggaatgttctgctatagttgtggaaatgggaaaggaggtggtggcattgacaccgctgcaatatgtctttccgaaagacactcccgacaacgaagccttcttgacgtggtataacaaattcgaagctgttgataaaggcaccatcaaatatgcatttgtggaagagcagcctcacatcaaaaacctccagaatgcggctgtggacgcattcaaagcaattggtgtcagcggtggtggtgggtgggcccgtgttgatatgcgtctggaggaaagaaccgggcttgtctacgtgattgaagtcaattgtatccccgtggtcttttacccaaagggaaacacacttggtgatgaccttgttgtgggagagagatttcctggtggccaggctgcattttttgacatgttactagcgaccaagcagatgcagcttgggtggcaccgtgttcaaaatgctcatgtcgccgaggtttacaacaaatttgccccctcgtaccattccgtgtggagcaattcggagctctctgagatgcaaaagtaccttactaccaattgggactattcgggtacagttcttgatgttgcatgtgggactggtggatttgggcagtttctccatgctcaagggatccaagccgaggtgactggcattgacctatcacccggcatgttggaaaacgtggaacattacagggaacttcgagttgggccaatggaggagcagatcatggtatgtgcctttggaatacttgttttgggaaaaatgaatgaagacaaagcttactttaatattagggtgctggtgaatatgaccatatcgtatgctttggtgccctccatttccttggtcctgtctacctcaatgctgtgctcgcacggatgtttatgcttgcacgcaaatcggtttcgatctcggtagacgacgtcagcgacgaatatatccaggcaatcaaagagaagcatggtgaattgacgtttaatgccaatcatgtcaaggccattgaagagttcggaattccaaaaggatggaaacgagtctatcacgagaggaggcttatgtattcttctccaaccaatggagagaaggtttatggatatgggatgcgctttgagagagcagatgcctagtatttcgatggcttttcaaaacctgcgtgttgacataatcccaatttcacaaactttgacatcattgaaagcatctgccctatagtcaagaattatgccaatatcaaatcttatatctaaatcgagcctcgaaacaaggggttgctgtcaagtagcttggcagaatggtaagtataatttcgaccttgggagtcctggacattttgctgctgttgcttgcttccatttttcggccacttcacatggctaggattaatagctagagatagcctgcctttgctatttctacgtgtatgacggatttccttgcacttcttggctttccttttccgttttagtcctcaggccttgccgcttttgccctcaccgattaaaaccaagcacgacccttgattatataggctcactgatctccgagggctgcaattgagcacacatgtacttcgtacctgaaacatcgcctgatttgatataattttgaggtgcctcggctcggatcttccttcttgtcaagtttggccatctttctggttgggctcggtaatgatctgcagtgctcaatggcaacattgaaaaggatatagagacaacattgctcgaattgccattaataaacaatcgatggtccataggaccgaccactactgacattgcaaagcccctgaaaatgcattcatgattaccccgtaaatagtagaaaaataataaagggctgtgcgttggccgatcctgacagttcttgctccggtgccggcattgtcccctggcatatatatctagcttcattttccgctacgtgatgctttttgctgcggaattgacgaccaaggcctcgttcagatccagttcaggagcttgagcttgccactcctgctctgacgcctcggtaatcgttcttatgacctttgttttggtatttaaagaccacagatcagcttttcagactcaacccgtgagcatttgcctcagtgaaagctggagctgaaggatatgcttgagtgagggtggctcggagctgaaaagggcgccatgattttgccctgatgaacagatgacagttgggatctatgcttgcagttcagtatgagacacaagaaggagtggacatgggatcagcccgagtggatgcctaatgagcgggaagtagctatgtttctgagcctaggccgtactttgtacatcccatgattgctgtggagacttctacagatacagaggatacatctgattcgctatcctggttgatgataccaactgtagatttagggttactccgctcggtgggccgatgcttcatacttcatgtctggttcgtcatatacgcacatcgcttctacatttacatagcagctatataattatatgacagtggaattgttttatttgtcttcgtccttggctatagacaaagtctccgatagctacaccccgggctatttaccgataagtgcccagctagctattaaagcaaagagatgaagcaatagacgtgaggtcagtgtccagaatggccggcgtggcaccagtatccgtctgctgccgaccggaaatgtagtgcaagccgttgaaaatactcgcggagctccttttcaatgttatcctaggataacccagcaggcagcggcgaggcaagaagagaaaagagcaaaagttcggcaaacatgatgaagcataagaactagaagaaagaaagaaagaaagagagaatgatagatatgataatactacagacaacaggtctctctctaataggtttaaatgtcgctgaactgtacggagtagttactctcctatgaaagataaatgcttggaatcaaaatgagactacaatgcaacctactacgacatatactcgggtttcttcattaatctgatgcatagaatacccccaagatgcaatatcgttcgctacacccttaaaccgacttcatcttagcattttaaaaagactaacaacatacctggtacattcggtattgacccatttgggtaaagattgtccggataattattacctagataggcataatcgaggcggattgccctttcgggtttgggcgccgcacggttaaaagctaaaatcatattttgtacaacggaactcaaatacgtacgctcgcctggaaatcaacggcggcgagatttctcttgttgtcacccttcggtaactagagtggtgtgtgctttttcatgccggacctaccgaaggatcaaggatcacccgactggcttcgtggactggttgcagataaagtgccttgccaggtagtgatgtgaatactgagcgaacatatgcaattggaacgctggagcatacatagctgtgcgcattcgtggaccttaatcgcggtctataggaatgttgatatagatcatcactggaactacgcgttcaattgcgttgatacgactattagtggggttgctacaaatccaccttctcccgcttgtccatatacacgccttgtacaacggcccctcgaaaacgacatgatctatgattctgatcgttggacaaggagatcagctcccggaactatctatgagcaacgtcatcgatgcctgaggccataatatacacgtggtcgtaaagtacattcaaagttatcccaaatttagcttgtttcaccttagtggagaggttattgccatgggaatatacgcatggtatggagcagaatcgtcagatgatgtacatggaggactatccgggatctagatccttgtactccgtattcgtggcagtttagttggctacgtgggacaggacactgaaggtatctgatacctgacttgatacccaaatctggcggggaagggctgtacccagtacccactgtaattttgatgcaacgggccccatgatgagatgagatggaaattaaaagcacaggcgtagataagtaagattaagcgaaaagcacttcataaaacccagaactacaaagtcatctatactcatagatcgtgcagttcattcttatctggtggttttgatccccgcggtgattacatacgtgtttccgcccctgcttctacagggctcgtggccatcagggatcggtaatcgatcagcacagcttcccccgaagcggaacctttctttcttctctcttcaactgctttctcgacggacagatgttgagtcgccattcccgtctctctctctccgtgcgtgtgcctagagtctgctcattttgactcaactccactcaccccatttcttcatcttcccctccccaaacccacagggaggttcggatttctctctttcttcgtcattccctcgggattgaaggtatgctctatcaagggctctgacttctggtctagtagcttctataaatcctcctgaccagatcctccaactccgtctgtcgcatcccggtgaaggcggcctgcttcacgggtacacacatcatcgggactgctggtgatgcaagcgggtgaacctcatggctaataaattctctattcatacagcgctagaccgcttcaattttcaatcgactttttctccatctccagtcatttatcggccgtgacggtcgagagcgtaccccacccgacctgcgcgacctggtctgtgttctgtgtgtggacaccacgcttgcttgccgctgtatcggcctgtcgcgcaacctctcctgggcacccgatctttcgaccaacccttgtaccatagactgctccgttacgacatctcggagacgaacgaaacgaatccatcttatgaattatttccctcgggtatatactccatcatgttttggcgctttgggggatatgcgaatctttccaccatcgataccctgctcgacaaacccgatctcactcttgaggaactcttagacgagcccgaaactattcaagaactgaaacagcttaatacgaaactcattgaatatctgcgcgaggatcatgccttgaaacggcttatggaatacgtcacggcaccgagcttggtgaatgacgacgaagatgatgcgaaagacacttcagagaagggcaaggatgatgccgcttctgcggagcagacagatatggacgaggagaaggaaggggatctgagggatattcttgacccggatgacctagacaaagtcgaaaagaagcgtctgacgcatgcctatatcgcctgtgagattctctcatcagagacatggtccatcctcgaatccatgatggccaaccctgcatacttgggcgaattctggggtttcctgcgacgacctcctcctcttgattcattgcaggcaagctacttcacgaaagtaaacgagactttgcttgataaaaagaccgacgagatgctggagtttctcaagacccttgatggaattgtcccagcattgttgcagcatgttgataacccgatggtcatggatcttctcttgaaaattatcagtcttgagaaggcagagggtggccagggcactgttgactggctcagatcccagggtttgatccccaatcttctgtctttcttgtcccccgatcgtccggcgtccgttcaaacctctgcaggtgacttcctgaaagcgatcatcactatatctgcaaacgcaagcccgaacgaccagtcatgtattggtcctaacagtttgacacgccagcttgtctccaccgagtgcgtacagcagctcatcgatgcgatgctcaagggtggcaatcccctgactgtgggcgtgggtattgtcatcgaggtaattcgcaagaacaattccgactatgatccggagtcccttggcggacccgatacaatgctcaccacttacgacccaatctaccttggaacgttgctgcgtctcttcgctaaacatattccccagttcatggctctcattcaaagttcccagcacactattcatgagggaaataagctcaagactgttgagcgaggaaagttgaactctgcttggggtgggcaaattgagcctcttggtttcgaccgattcaagacgtgtgaattaatggcggagctgcttcattgcagtaatatgggtcttctgaatgaaccaggcagcgacgagtatgttaggcaacgagacgaggagcgtgagcggttaatccgtgaaggagggttcgatacgcgaggcttcgatacacaccaagatgagcattctggagttgataccgcggccgattttgcgaacgattcagccctcgattctggatccccagaagatgccaaggtcacagaagtgccacacgtgggtgaagatgacggatttgaagatgttggcgcatctggtgatttagtgagtgcaaaagctgatgccgacacaacggctactgcaaactcgcagccgacggaaacggtcagcgaaacctctccatcggaaatcacagagccagagccggtgtcttccgaagaaaccacggataaatctgaaagttccaccacacccattgatccctcgtcgcctactactggtctctctgatcaagtcagcgccatgaatcttgaaagtgaaccacaagacgagcagcaggagcctggaaaggacaaccaggagcctgtggcttccctctcccaagatgttccagctcctctcttctccaaggaacaagcatccgagtcagactccgccccagccgatcaatcggaagaaccatctagtcttattgaacaggtcgaggaaacgagcgttccgaacgacggaggcgatgaggactcggccgaacaatacatccaactcgatactgacgggcgacctgtggtcggcgattacctgaagatccagttcgtggagaataaagttgtcccaacgattctggtttgtatttcttttagagaacgttgaacacccacgctaaccattgatagggcttcttcttccgcttcccatggaataacttcctgcacaatgttgtttacgatgtgattcaacaagtctttaatgggcccatggagcgtggctacaatcgggcactcgcagtcgatgtatttgacaccggacgaatcactaccgcgattgttgaagggcagaagcgcagcgatgagacccagcggactaagcaaatccgtctcggatatatgggacaccttactcttgttgcggaggaggtcgtcaagttcagcgagcgtcatccgccagagttactctcacggtccgttatggagagcgtgttgaatcccgactggattgagtacgtcgaacaaactttatcagagactcgcgaacgcgacaatgctattctcggcggtgttcgtcctgatatatcggttgggcctcgccagactagccttaacaacaccaactctggccaaggcttctctaactccgctctggcggacgtgggattgaatggaggaatcggtggctcaaccttccagagtttcgacctcggccaaggaggtgtttccggtggagcattcggcggaggtggcacctcccttttgagtggctttgccagctcaagcgacgacgaggacgaagaaatggaggaccaggacgagagagactccggcaatgccgatcaaaatgacaatgacaatgtgggttacctcttccgatggacatgatggtgcacgatctcaaccgattccgtgcatcccccattatcttcaccattccttcccggtttacccctcatgtatcccaagctatagcaagggccaaagagccagaattccaggtaaagtgctggatcgctagtgcttgggcaatgtgggcttgactaaaactggtatcatgcctgttagctgatgttcattgccgatatcgtgttgcaaatctcagcccaggggaggggggattctcgtgtcactttgtcctgaactgggtttcttatgcacttttccctttccctttacaaggaatgggctgtcagatgtattgtctttttactaactgactttctattaaggtgttcacaagttcagccagtcaacctattcctatcttacccccgccacctgctccattgagcttgggcccttcccgcgcacgccgtcagttagccgcacgtcttgccgctcaaaagcaacaaccatcagaaaatgaaggcgacggagattacaggggggccgaaggaagtgaggaccgagagtcagattggccggataacccattcgtaattgcagggatcgatgaccccgccgacgcaggcagctctgcgttccctaatagtgactttggttcagccgatggcaaacactcacctaccttcccggaatcaggattcagccctccagactcgctatcaactaactcatctgaagatgaaggtgatggccacgcagaatccgtgaggcgacaggttcgtgtccctctagaagtcgaggatgacgacgatgatgaaatgggtgagatggtcgggccgagtggcattggcatgatggactccgacgacgaagacgaggctatcataaacgaatctcttggttactccaacctctcgggccccgcccgatacaacaacttccgatcacgagccgtgagctcccattatgatgatgagcaaaacgacagcagtgatggcgaagatgatggattggtggagataatggtccctggccgcaaggcctcgacctcgaactaagcctgggctctttgcatttgatttcgtggccatgacggtaaatcccaacggcaaaaaccgtgggggcgagtcaccgttgcggcatggcgtttgtatatagactttccatcgatggagtagccatggggttctgcatggagagctttctgatctgatgtcttatttgtgtccttgcatgtattcgcatgctacgtgcctgggatcggcttacgagtctgtggcttttgattggtattcgcttgtgtacgatagttgtctggagaagcgaattgatttattttgagcaaatagtaggaaagcctatatcagcccgaaagtatcatttcgtagatcattcttataagacgcgcaaaaaagaacgttgaatctctcggagaaaaaagcgggcccccaccatcccgcatcaattcttctcaggactttgacacaaccaagtcggttcattcttggataactttgtcggtagcaatcagtcgtgcctgtgagaaaatatatccaacaaaaaaaaaagatacacttgcttcaaaaatggcagcttcctcggagtaagtgcagtctggagatacgtcattcccaagcgtatatctaacacaaaacagacaagtcgatccaagtttaaaagctcacacagagctagtgaactggttcatccagcatggtggcacggtcgataagagcgtgcgcattgcacaagacgcctcgcgcggcgtgcacctgcaagtgagagcagactggccagaagccatccgaaaagagacccgagtgatcaacaccccaattagcgtgtcaatgtcctggtacaatgcaattggctatgagtcaccacggggctcattccccaaacacggcgttgactttccgcggacatggatcgacgacgtcgggccggaggagacttttgccttcttcctcatgggccagtatctacgcgggcccgacagtttttggtatccgtatcttcgtaccctgcctcagccgggtcaattgactaccccgttgttctttggtgaggaggatgtagattggattcagggtactgggattcccgaggctgccgttgagaggattaagatatgggagcagaagtatgattcgggctatcttcagttggatgcaatcgaattcccggattgtgagcagtatacgtggtgagtacgagatactgctgtctctgttattctgcccgaggatgacattatgctgatttgtatacagggagctgtatctctgggcttcgactatcattacctcccgggcattctcgtcaaaggttctatctggggctgtcgagcctggtgatcttccagaggatggagtctcggcgctgcttccgctcattgaccttccgaatcatcgaccaatggcgaaggttgagtggcgagcgggtgacgaggatattggtcttcttgtgcttgaagatcactcggcaggccaagaaatttccaacaattatggccctcgtaataatgaacaatgtacgtatcccatttgccggggcgtgatatccgagccttgagaacgcctgaatcatcatagacactgaccatatgatagtgttgatcaactatggattctgcattgccggcaacccaaccgattatcgcattgttcatctgggcgtgaagcccgacagcccgctcggcgaagccaaggctcgccagctcgaactgttccctcaggttgccaagaatatcgaggaccactattacatcttcaatactttctacccactactggctcccgaaacaacgatggagcactcgatcttttcaccggcattgttcaatgcattgaccgtcatggaatcaaacaaacgcgagcgcaaatcactcgagatcaccgagagctgtattcgcattcttccgggatatggaaacaaccatagtatctatgctgcactcgctcagattagcttcgagctcatggctcatgccgcaaacctgaaagccagtgcggagcatctgcctttgcagccaaccaccctgaaccagatccactctcagatctaccgcaacggccagataacattagaccaggctgctttggttatcgctacttggactattgcacgcgggagggaacataagcgtggtgaaagttgggaagataccaaggtcctcctacatgaagtaatggcacgcgtcccggccggccttctctcagacgaagtcatgtcccggatccgagtgcgtatcctagaacgtccgtccctgatcactaaaaatggtgaactgttcaggttaggcgaacttttcagccttctgccggctgaaatgcaggagccggctcagacatgcttccagcacgccctgggagaggctagccaggccgttccgagtatatccacagatccacagaccctgtttgcaacggttatttgcttgctggttgcaacgtataattcgccagaggcacggtcaagattgtcctcgcgtctcaaccgatggtttactttcctgctcgagcaataccctctgccttccagatctattgagactggtgtggatgaagccagcgaaacacttcgtcaattccaaagatatactacggcagcacaaccaagctcatgggcacctggtgatggggttaattggcttactgaggacagcgggtggttggactcggagtggcttcaatggtcatggacggtggcgggctcagaaatggtgatgattcctcttgatccatttgagatcctcaagatggagggatcattgtctatgttgaaacaggcatgtctctatgtaccacaagagtagataaagaggaagtagacatagaaatgagcgagtcgtttatggtcttcgttaacaatcctctctcttaaccccgataaatcgagaagaagaaaaaaagttagaatagacgttcaagaggaatttcgaacaaatgctagagaaataggctatttaactggccatatctttatgtatatggatcacgtgatatggcatagttataccatcctaatgtggaattctgactcagcaatattgtcacgtgtgagcatatcacccaatcatatcgagcccaaaggcggatcattcagcaagcgcaggaattgccgtgagctccacgactcccttcccttctactccacgaccctttgaccctcactacgcattgtcacccccgccgtcatcatgatatccagagcggcggctccctccacctcctccctctcccacctctcgatccgctccctccgcgctccgggggcggcagcccgctccttcgcatctgtgtcggaggcgcctcccgtgaagcaccatggcggacttaaagaccacgatcggatcttcaccaacctttacgaacatcatggaacggatttgaagtcatcaatgaaatatggtgattggtaccgcaccaaggatattattttgaagggtgatgattgggtgggttgtcgcacaattgacgatctggggaattaccaattgctaatcccatgaccagctcatctcagagatcaaggcatccggcctccgtggccgtggtggtgctggtttcccctcaggattgaaatacgtaagtggcccacacgcaattcggacaaataccagtgctttaggataaccgaactgactcgctactcgatagtcgttcatgaacttcaagggttgggaaaaggaccctcgcccccgttatttggttgtcaacgcagatgagggtgagcccggtacttgcaaggaccgagagatcatgcgcaaggacccccagaagctgatcgaaggttgcttggtggtgggtcgtgctatgaacgccaacgccgcctacatctacgtccgtggcgagttctatcacgaagctaccattctccagcgggctatcaacgaggcctacgcggctggtctgatcggtaagaacgcctgtggcactggatacgacttcgacgtgtacattcaccgaggaatgggcgcctacgtttgtggcgaggagacctcgctcattgagtctattgaaggcaaggctggcaagccccgtctcaagcctcccttccccgccgcagtcggtctgttcggttgccccagcacagtcaccaatgtcgagaccgttgctgtgacaccgaccatcatgcgccgtggtgccagctggttctcttccttcggccgtgagcgtaaccacggtaccaagcttttctgtatctccggtcacgtcaacaaccccgtcacagtagaggaggagatgtccatcccgctgcgcgagctaatcgagaagcactgtggaggtgtccgcggtggctgggacaacttgctcgccattatccccggtggctcgtcaactcccatcatccccaagtccgtggccgacaaccagctcatggacttcgactccctcaaggactcccagaccggtctgggtacagctgccgtcattgtcatggacaagtccacggatgtcgtccgcgccatctcccgcctgtctaaattctacagacacgagtcttgcggtcagtgcaccccctgccgtgagggcagcaaatggaccatgcagatgatgcagcgtctcgagaccggcaatgcccgcgagcgcgaaatcgacatgcttcaggagctcaccaagcaggttgagggccacaccatctgcgctctgggtgaagctttcgcctggcccatccagggtctgattcgccacttccgtcccgagctggaggcccgtatccgccagtacgagaaggagcttggcggtgctcccttcgccggtggctggcaccccgacagccgtgctgagggcaagttgatctcccctggcatgtaaacgcacctcccacctttcgtttttccatttacaaccccttttctccctgtgttgtcccctcaaaaagaagcaggaacaggtcgaggatgattatcgcttctagatccctcttatatctccctctccctggccggtaatgttttctgtctgtctggtccagccggggagggtggcgtttctcttttctttactcagcccgatcccctcgtattcatctatcgcgcctaggtttcctttattgtacagttggtagcaaatttgatgcatttgatgtcttcattcgttttatgtatggcgggttttgggtccatcgtgccaactggatttctggccagaaggttaaccatctgccatgaatcaacattgatatatctgtagtctctcaaaggcctagaaggagaatagataagagcggaagaggatctaactaatcgacgctagaagtcctagatattgcaaggtaacaatcttgattcttgataatagtcactatatcgcagccttcttactaccctcactagccataagatagtgtgttacgctgtcaagctactatatctgagaaatgtcgaagtccatttcgatgctccgacaagaacgaatcaacgtttctcttctcacttcatccaactaaccgttgagcaagcacttgacaaggccattcgcctttcacattcacagtctcgaatctctcaaacccttgagactcatagtactggatcaattttccatcgccacccgcatagcaatctacccgtagtaaagagaccccagccttcctagcaagatcacgcgcatggtccaagagacgtctaccaatctgactgccagcacattgccgatccgtgactaataaccgcacgtaaagctcaggctcagagacaggtgtcacatagggcattttatccccaagagcgagcgcaccgacgacgacccccggctcttctccgttcatagtttgggcgagccaaagaccatggccggttgttgcaaattctttgagttgctcggcgcgttgtgggttctcggaaaaggatgctgttccccattgcccggttctgttgtgcgatactagccattggactgcggtgtctagaagatggaggactgccgggacggcgtctgctgttccccgcacgatagttatgtcgtggactccattcttaatcgggcttttgagatttttgttagtatctgtgagtggcctttcgcttttgttcttcatttgatattggccccttccgatctacctcttctcgggtaggttggcgctttgaacaataatacttactttgatgccattatccaagcagtctgaagggacgattgttgtaaaatagcctcaataagctcaactagttgaacttttggggggatctttggaaattgtcgagtgagaagtcctactgtacatcctggagcggagataggtaaataaaggcttggcaatgacgtaatctcactgtgcattcatgcaatcgcaggaatgtggagatatgccgcgagcgatgtagcatatccccattttctccatttccatcaagcgattaataggcgaatcaattcagtaacaacatagtctctcacctcggaatatcagagcgatgatctcccgtcttccgcttcactccgttcttctaggttcttcagcgacattagcatcattagcaccagcaaccaattcctgaacattagtatccttctgttctctcccatcggcctttccttcgatctgaatctcagcagctctcgcatccttctccatcttctgttcgatcttgagcaacctcttctctctccagcccatcccatacacattctcaacccagagcagccccattccagcagtcatggccaagcccaagaaaaagaaacaccatccccatcccatgccacttagcatttggctaatgaccgcggcaccaacagcgccaaggcagcagcgaacaaggttgcatgccgatgcagctgtggcaggcttgtctgggaataggtcgacaagaagggtgttgaggcagttcagggccgcaacgaagcagaatcctataatgaattgcagcaccagtggagcggctaagtgtactctttgctgcagcacccacccgtacgggatgaatgctacaacgccgatggccattgcggggaatactgtttgcaggcgagtgtgctcgatcggaaaactgcgcaaatcgtcccctttctggcggttcactggaaatccgagcttttgggctgtccgcttgtagttgtagtcaatgacttttccatacaggactgcgccgaggcaagagcttaccccgaggggcctgcgagtttgttagtatggaccccggggtcaggaagatgaggcagacatgaagacttacaagaaacagagcccaatctggagctcgctgaatccatacaggggaccaaagagattaggagtgcttgttaacagagcgatattcgcgaacatcacaatcccgacgtacgagatgatgatcaaggcatcccactccagtagaatgacaaaggagctgagaggattcgggaacctaagtctcttagtatgcgaggactgttgttgcgacccttctgcatcagtttgcctttcctcagactgtgtctgcctcttcgaccaccattggataaccgacctgcgccaccactcgttcggtactgcacggccgtcaccaacaattttgcgtgccgtctccggcatagtaagcacatagaacaccaagtaccctccactaacaatgaccaggaaccagaagacactgcgccagccgaggaatttggccaaaagaccaccgataacagggcccagcgcaggcgcaaccataacacctgcagccataggcccgatatatttcccacgctctgctgttgtcgtaatgtccgctataacaccatatccaaaggccacggtgccgctgctccctgcgctctggagacagcggaggacaatcaacgccgcgaaactgttttgtaacgccagtccgatgttagcagcggtgtacactgcgaacgcaatgacatatgctggacgtctacccccggtgtcggcgaatgtgcccatgaagctcgggactaggccttggaagatcatatatgttgtgactgtcaggttgatcagctcgggtgtaaggtggtaattccgtaccaatgttggcatgaccgggtagtagatttgaccggaaagtggggagaagaacgacgcaagagtcaccatcatcacgatgaatgacctttcgtatttgctgaatgccgaaaatgatggctgggaattgtccggtgctgtttctgtgctctcgatatgtggctcggtagctggcgagcctgagtcttcgggttgaatatggtcgttgttggcatcgctgggggatgtatgtgtggttggggctgcgacgggtgcttcatcaaacccgccatatccactatcgactcgccttatattgcgatctaccggggtgtgctggaagggaccaggtactgtcactgtctttccctcgcgagttccttcagtcaggtgcagctccatgatgaatagtgtgtaataagccggatagaatgataacaggtggatatgagagaggtagagaggagagaagcagcaaagtaccgaattatactccgtgactctttcttgagtcgtactttccccaaagtgtcgcacaactacgttctatggtttattgcaacccattcggaacggagtagctaggcttcttttatactatccaaatttatgtatcactttgcaaggtgtacggaactatttagcatcccagagaaagtctagcactaaataaaaaccactttgttatcatctttatcggtcttttttgaggtcttttccacggtcctttagaatgaataattaccccctggtattatagcacttatttttgtcacaaatgtaccaccgacctcattgacttgcgaaactccatgctcggggatcctacttctgggtgccctaatagaaatatgcagtacgatagaacaggtgtaatttcacagatagttatgtaattctctaagtcattaaaataatgcaaatacaattgaataataacaacattcacttttgagaggttcgatcgcgagtacgaggtgcctatgcgccactgttgtgatatgaggctggtgcagatcagaaatcaagccacaccatcggaataaattcccacattgcctatgttgtatacgaagaaccaaaatcgaaaattaacttgatctactcgttgtatatataagcttagttattggagtctaggttgtgcttcagtgtactcatgtatagcatcattcatgtctaatacgagagattaagggaaccggacttgtgcactagcaagggggatagaatacagatgagacagatagtaaaaagagcagaacaaaagaaaaagatcagtgcttgggcgttagatagttagtgcccgctaatttcacaatgaacataggcaaactaggacattattctccttatttcctcaagacttaataaccaccagccatgatgacgccgtagtatcgacggctcatctctgcggtctgcaaaacgcgagcgtcacctgtcaagggcaggcccaggacagcggaagattcaacggactgtaaaaagacggaagtcagtaatgaacgaaagcaatatatcagcggaaaggagggagggaactaacatgaacatcttcgtgtgtaatccagccggcgacagcccggctcatctccttgaatgcaacacgctcctccagtccttccagactggatccctggacacgatcgcccatcgcaacaagagcgttcactaggcggttcaggcgaattggatcacgtcggccgctggtggagttgacaaggcggaggaaatcttcataaacgccgccgccagaagaccagccgcgcattttacgctcaggcgcgtcaccgaagccggagaccagagtttcgagggtacggtagtcgccctcgatgatggtgcttgggccgacgatgcgacaaaaggtggtgtgggcatcgttccagtgcttgccgcgaataagacagtctacctcacgggcagaatcgccgatgtcgcgagcatacagagccttggcaacccagatccaggcttcgggaagctggagatcagtgatgagatattgccatgccaggtcggaggagccgtcggcagcgaagggctcggggagttgagcggcgaagcgggcgagagtttcttggacagcgccctttcggtcgttaccttgggagaggtgcaggaggacaaacaatgcttgatcaagctttccgcctgcactgagttcagaagcaaaatcccggacgagttggtcagtttggtgctggttgattttgatggcctggttttttccgactaccgcagcgagaacgtggtgtagctggaaggacagtcggttggagagacggtcaccggagacggattcgggaaggaaagatgcggggaattcaacgggttgggtgacgtggccttgaatcgccgagaaggccttgagcagaacccaaagaggagattcgcgcccaagggtgtcagagccaggctgcgggactgcacgggtactagcctggtgcgatgggtgggggaaggcgggttcttgtccggtggccaagtccgcaaggaacttggagacagctacctcgattggctcatcttcagccgtgcaataccacagacgaagaccaaaggcctggaaccaatctaggtcgaaccgctcggtgaagccaaagctggaggcccggtcttcaagcgcaccgcccgatttgccttcgctgcggagagcattcccagcgaccagttcgtaaagggctcgtatgggttcagtcatctccgagagtatgttgttctgacgccacacatcgatttggttcgctatgtcggcacgcgaggtagcatcgcggccaatctgtgcgactatagtcgccagatggggattttgactgtcaatcagtgtcttacaggcttcctccactcggtgcgaacagatcaaatgaacggcccgttccacaggggagcgaattgcatccaggttttgggagtgcttttcacgaatgattccctcccaaagacgagtgagtcggtccttcctgatccggtgcgcaaattgctgtcgtaggcgcggcggtacccccgctgagatatcgtcctcaatatcatcattgaaaagaatgttgagaagctgccacaccaagcgctcttcttccgactgggaacgggtggatggtgacagagggaactgcgacaggtcgatcctggccatacgaacgaaaggggtgccatcaatgcgctggatagaggactgaagccgctggacatcaagcatttccctgacctgtatcatcattagtatccagttcaataaaccaataaagccactaaacctacctcgctagattggttgtatgtcatgactgcaatatcacggtcttcgctgaaaatggagaagctttctttccaggtctggttcacccctaggattgtgtcccccatatcatttttgacacagatgagggaatccatgggaccccagcggggtttgaaagagtcatggaaagcggcatcggattcgctcatttgtgttgtatcgccagcgaaggtcttgggttgcttgttgtaaggccactagaggaagaaaaatggttttagctcaggttatcacatttgttaaactatctgaaaagtgacgcgcaatttcatagatacatgatgcagtgagaaaaggaaaaaaagaaagggaattataatcagtgtgaacataagaagggagttctaacctcaaagccctttggcgttgctttagccttcagcggagaaggggcggcttgcttgcgcggctgctggaacaaagagttcataagatcaatgctgtttgagaagcctttcttcggagatgctgtcgcaatgtttgtgggagattcatcgttcacgaggttacgatcaatgaaagcgcttgcctgcatttcacgcaaggcatcacggttctgcttgcgagggctgatggtacgctgcagctgctcggcccagtcgccactaagatcaagctgaggctttgcgggactgccgaagtgtcttgacatatggtaagtggtatccaggtcaccattggtgctctgatagtcgttccgctccacggtgcgatgaggagtaggaaaggcaccggccatatccatttcatctgcctcatctgatccaactaccgaatcgccagactgttggctctcggtgacgacgtcgtcgtcattctcagtagtcgaacccgtggagccttcctctaaaaaagactcggtttcaccgtcagaaaaataatcatcctccacaggcatggcctggttagcgaaagagccaggaacaagcttgcgctttttgaagtcgaaagtatcgtcttcaacaccaatcatggaaccgacgaaggactcatcgatagaaaaggtagactgatcgaaagacgcggggtcgaagtgagccctgctggtagcgtggtcagggccttgggcactcatggtgctttggtcgtgactctcaccttcctcttcatcgtagtcaaggccatatgtagtgaaatgaggcaccttgaaaacccaggttccagtctcagtttcgtagttaacgaactcggtatcgcccactttctgcagacgatcaatgtgtttgtcaaacagaggaccactagtgacaggcgagttgctcttcttatctctaccacggggccaagagttctcaatccgtagggtagatggcacgttcagtcccttgcccctggcaggcttgaccgattcctcggggtagacagtaatcttgcgaagaccaatatccacaatattggagaaaagattgtccagatcaacggtagtcagatcaacggggccgttgaaagtaacagaaccacagttctgacggccaacggtgaagtcaacgacttgtctgagctggtcgcggctcatcctgctaagctcggcacgggaaggttgcatccagtactcaccaggtcttgggtcaccaccggggatgaacgtaagacgcttaacagtagcaccgttggtggtttgcggtgcactttcggggacaacggcaaggtcacggcgggcagattcggcctcgggacgatcagaagtgccggcagcatcgaaaccattcaggctaccgctcttacgcacagagcgaaggaacccaagctcctcagcagagggctcggaactgttaggttcaacgtgaacaagttctccgccattgaccccggaggtatgagagtcgaagctgacctttttcttcagcttgtcggaagaatgggcatcttctccgttagtgagcaggggggccggggtgtgaagaggggccggggcaatgcgagaggtcgagaatatttcatttctcagaccacggttgatagtgagacgcttcagactgctgttaccacgtacgctgccagcctgcagggcaccgggagaaagaatgctgtccgcctctggatcgaaggtcttgcgaaggttgctagtggagtaactcttgctgaagctacgtccaatgctgccattgacgctgccgcggagactgctactgcccccagcaccacccaacaaactactaccaagaccagatgaggcaccagtgctgccagatggcgagccataggtagaataggagaaaccatatccacgctttggaggggtgatgagtcgattggcagcgttgggagtaattctgtagaccggcaacggagttcgctgcttttgcttcatgctggaagacagtggcgtggcaaggggaccgggagccgatccaccaggggcaggaagaccagagaagatggactgacttccatacgggtttccatcaagaagcgacgcttggaagctaccaggggcaggctgagactgttgtccgggcattgaggcaccgaaagcactgacacctaggccaccctgcggttgctggttttgaccaccgaagagcgaagagccggcgccttggcccgtgttggtttggccgccgccgaacatgccgccaccaccagttcccgtagtcgaggaaaagagaccaccaggcttctgctgctgttggttctgcgtgttgaacaagctactaccgccagcagctggctggggctgcgaggcaccaaagccagagaaaccacccgtggtgggagctggggtagatccgaagagaccaccgggcttttgttgattctgtgaaccgccaaatagcgtacttccggtaccagcttgctgattttggccaccgaagagtgagctacctccctgctgctggggttgctgctgggctccaccgaagagcgaagatccagcagctggagtgctgccagcaccgccgagcaaacctgttccggctccctgttgcggggtgcccccaaatccgccgaacaatgacttgggttgggtttgagcttggttctgttggtttgcaccaccgaaaccaccgaaggcacttggtgcttgctgctgagcaccaccaccaaagggtgaggctgtggcggtcggagctccgaacggattcgcggcagtggttgtttgggtattaccgaaaccaccgaaggcgccaccagttgtaccagtggcgccaaaggcgggcttgttctgctgttgctggttgttactaccgaacaaagacccgccggtgttgccgaaagccgatccagtaccggtgttgcctccgaagccaccagcggtctgtgtggctcccccaaagaggcttcctgatgaagctgcaggagtagttccaccgaataaggaagttgctggtttggctgctgaaccgaacaagggattagcaccagtggagccgaatccaccggcagtctgggttgcaccgaagccggttggcgcacttgtggcagcccctccgaacggagtggtgctagcgccaaaggcaggagtagctgttgtattttgttgaccaaatccaccggttgtagtgttaccgaaagcaggagcgccaaaaccaccggcttggccactgccgttgccgaaacgacgaccttgttggtaatccgctaggcgcagttcctcgaaagaccatttactgtagggttgcataaaacagatgctttggtagtggttcgtggtgttggctgagctggtatccttctcgttccagggactgaacggggtgctgccagtaccttcgcagttaggtagacctccttggaaagcagtacctgagccgccgaaacctgtgctgggggttgtggtgggggcagcggtagatccgaagccaccgctagtgccgaatgcgctggtaccggtagcagtgccaaagcccgtaggtttggcaccaccgaaaaggcttccacccgcaggggttgcgctggcattggcgccaaagccgccagtggtaccggtagaaccgaatcctccaccagcaccgaagccgccggtggtaccagcagtctgagtgcctcctccgaagagagacccggtgttaggagtgttgggggtgccgaatccaccggggcgagtttggccgccgaaaagggcattaggttgttggggtgtagtattggttccgaatcctaatgaaaatcaagagttagcaaacacgatcgacgtttcaatgaagcgactaaacaagtgcagattgatgaagagtggtcctggggcgcatgtcggtggaaatgtgggcaagtcgcaggtgtggagattccaggggggagccacgagcggtcattccagggggaccgaggagcacattcacagatcccatgtgcgcgagcggtcgtttggatcgcaaggccacgtgatgcgacgggagacctcgccagggaaaatcgggagggcagcgcaaagctcacgattgagcacgtacctccgccagtgccgaagccagtagatgtgctaggggtgctaccgaaggcgcttgaagtgccagtagtagcacctccgaacggggaagctgtcgagccaaagcctagatgacggaggggatcgcggtcagagagacttggattcgaagaagctcttgcattccttatcttgttgtggtgtcgctaatgcatccaaatggtccgctggtgaatttcaattgcacggcgaagcttattatgttgaagttttttgtcttgcgcgtggcaccatcgcgggtcggaattaggagcatcgattgttgatagggaaagccgaggacacgagtagaatgggaaacatggggatatggccccaatgtacaaggggaattcgaaaagggggacagaaaagacctacctccaccagtgctggtgccagctccgaagccagtgccagtaccaaagccgctgctttggttgttcgaaccgaaccctccaaatccgaaagacatgatgtcggctggactttgtcgggtgttcacgaagtcataggttgattgcgcacaatttcgagagagtgcagatcaatagaatgagacttgcgagaaagggtgcgcggagatgaagagaagagaggagacgcgacagaaaagaagagttaagtttgctggagacctgtgttaggtaaggtccgggtcacagtgatccgtcacgtgacagctgcctaaatcggtttcttccaatgaatgcgagcaaggacaatagatgataacaatagagttgtttttgatctgtttattgacgggtgactcattgatgcatactgcagcttgaggtgagatatcttatttatcgacaagtattgttttttattcacaattgatgccaaggtgaaaccttatgtatacatatctacttgatctagtttacatcccactctaattctttccctttcttaattcttgctgtattcatgacttccaaatgatccgtcagttcctacaatatttaaccaaagtcttacttccaaggcttatatcgacatgattgattcctatcacctctaaacacgaagaagaacgtatagacaggcccatatgcgtctagtacctcgtaacctataatatgacacatactagctccgtatagatgactgccatccaatcaccttaaatctcgagtgatcggtacaaccacgtgcgcatatcaggtggtcaccgctgtagaccggactcccacgcgccgaaggcaactataaaaacacagcctcattgctatgatttcctaacctaattcgagataagatagttactactgataattctcaacaaaagctagagagttcataggttattcacatgaggttggttcgcattctgcatgagagaccgcaagccatcattaagagagttgagatctcgcggaggttatgtaggtccacgacgagacaacagcgacttatgtacggagtactccgtaggaactatgtgcataatgccatgccgactacatccaatgggggctagggcaatgcaggtaagaaataacccctcattgggtatgtacgaactcacctgggcataggaggataggtcccacgatagaaggtacccaccgataaacactatacctaattgggatgggccttccaaggttggcatcttggattatgtaatgtgccattttcggtctgaatccggcagaattccgactcaaaggcggaaggcatagttaagccaataggagtgcttccaaaagaaaaccaagcactaagcctaattgggaagccttggcgctcccgaggtcttcattaaagagtggggttgattttaagtctggctgcatccgggtttgcccagggtttggtccgaggtaagtcatgcaagacgtttacatgcaactaatggattgttttacaattggtacatagatattgaccccgataattaaacataaatccaaaacttcgaactcgaagtatatttgaagcccaaaaaaatactattcacatcgcttctgagcgagccaagggaatctcaagtacaagtagtcatcctgaaatcgggcaaaaaaaaaaaagaaaagaaaagaaaaccgcccgcatagtcgagtccgattccgacatgaatctggaccgaggtcgggggtgtatgatccactgaggatcatcgtgctacttccaaaatctcaccgggaattttgttctccgacgtcattatcatcaaattcatagaccttcactttacttctggcgggcggcgtggacggttgcgatgatcttctccacgacactggggtgggagagctataaagatgatttcgttagttattggtctagatatacgattgcaagtgttgaggattgtgcttaccgttgagatatcaccgaggctgtcctcctcaccgctgaggatcttgcgcaggatacggcgcatgatctttccactgcgggtcttggggaggtcatcaacgacgaagacggccttgggagcggcgaagggaccaatggacttgcggacttgcatggcaaggtccttgctgatgttttctgtcgcgctgccctccttgagagcaacgaaggcattgacagcctggccggtcagctcgtcggcaataccaacgacagcagcttcggcaacgccagctatttatagttagtataggctcagtcggaaggttctgtgattgcacttacggtgctcgagaagagcagcctcgatctcagcggtggacagacgatgtccagaaacgttaacgacatcgtcgacacgaccgcggatccagtagtagccgtcgtgatcacgaccagcaccatctccggtgaactacatatgagttagtatcaatcccataaagtgaggttgcaggcgtcttacgtagtaacccttgtacacattcaagtaggtatccatgtaacgcttgtgggcaccccacacggtgcgggccatactgggccacggctgcttgaaggccagaacaccctcgacatcgttgccaagaatctcctctccggagacggggtcgatgatagcaggctcgataccgaagaagggcagggaagcactgccgggcttggtgggggtgatacctccgagaggggtgatgacatttgagccggtctcggtttgccagtatgtgtcgcagatgtgagcttcctccttgccgacagactcgaagtaccacttccagacttctgcggcaatgggctctccgacggagccaagaatacgcagactgcgcatcttgtggtgaatgtgctcatctccagcgcgcttcagcagacgcagagcggtgggggcaacgtagaattgtgtgacgttgtgcttctcaatgacatcccagtagcgggagaagttagggtaggcgggggtactctcaaagacgacggtggaacagccaagcaatagaggggcgtacacgacataggtgtggccagtaatccaaccaacatcaccaccgcagaagtagcgatcatcagagtggatatcgaacacgtactttccagtcatggcagcaccgagcaggtagccggcagtggtgtgcataacacccttgggctttccggtggaaccggaggtgtacagcaggaagagagggtcttcggagctgaccatctcaggggcgatgtagttggggtacttctcgacctcctcgtgccaccaaagatcacggccagcggtccaggggacctcggcaccggtacgcttgaacaccagcacgctgtgcacatcggggcattgcttcatagcctcgtccacaattttcttagtgccgatgaccttgccaccgcgcttgccctcgtcggaggtaatgacgaccttagaggaggcgtccaggacacggtcccggagggagtcggaagagaaaccggcaaagaccacggagtgcacggcaccaatacgcgagcaagccaggaaagcgatcacggcctcgggaatcataggcaggtagatggcgacggtatcacccttcttgacaccacgctccttgagggtccaggcaacccgggacacttcgcgcaacaactctccgtaggtgatattgcggccctcgctgggctcatcggcctcgtaaataatagcgaccttatctgggttcttgagggcgtgacgatcgacacagttgaacgatgcgttcaagcggccctcgacgaaccaggcattgtcgccgttctcgaatgagccgtagtgtgtagtctcaaagtcgcggtcgaatgtgaggagctcgcgggccatgcgggcccagaaagtgtcggggctcttgatagattcttggtaaagcgtcttgtaatcttccatgtccttgaggtgagtgccggtggggtgcttatcgtggaacgccttggggacgtggaaagtgtcgacatcgtgtgcctcatgaacctagggcacgctgttagcctatgatccgcgggtctgatcatcttaggtaggtgactcttaccactgcgggcttgggaggcgaaactgggccgtccgacatgattgcgcggtccaatgggaatgattaatgcaggattccgtatataataaattctgcgcgagaccaaatgttagaggaaatgaattgcgaaaagtccagaataagaatggagcaaaagtgggaggagctctttattaatgcaaatggtggggttggccaaacttacttgaaaatggaggttataagttataaagcggtatggacaaacggggagagtcgcgggggggtatgtatagcaattagagaagagaaagaaaagaagaccaggaggggattcacgacattattagtagttccagcttgcccggggcgatgtgccactttccctttccttcccttccatatcgggggtggcccgtgcatggcagtatcataaattacgccaataccactctatacatcgtgtcttagccgcagacggcctctaatctacatgtacattgtagaactggactgctccacttccgatctccgaaatcaggatggaatccgatacatttcgagtacaattcactccagtcataaccccgtgtcattgcccatatgagtttgggttcggccatgcgggggtttgaacgtcccttccgttgctccggggtagcttgcccctccacgatatttgactaagatgctgctcgccacctcattggggcgtttcgagtcgggaagaaacgctagttggaccgaccacggcctagttgttctcgtgttcaaccctttgtccgagtccaataggcgggggccataatcttggcttagccatgggccaaggtccggggaatgtcgcgggccaggggagagcgggccacaggaggcctgcaagtcagtcacgtcagtgagattcagagatacaagtgtacgacttatcctcgagccccgcgagctgtgtcccgccaagccttccatgttgcgttcgaatataaaagacctacctcatgcatcccttgtatcgattatgctactcagacctcgggaactcagttggacttggatatgtcataggatgatgttatgatgtcacgggattttcggaccgagtctcccccataaaacttagttcgccatcgaggctcatcatgggaccggatcgccgacttcgggagccctagagaatgtggggtggatgagtcagcgctccaaacccgcaattggcgctgtttgatcggatgaccatcgtcgtctgaaactttgacattgcacgtatgtggtaatccggaggaatcaggggggattgatattaaaagattaacatgggcccactgttcggttacgagctctatttgatttactccgttcccatgtcgttactagttatcataattatcttattgttatatacggttttatgtattgtggggtaaatgagggtgagacaaaaagggggggtaccttgcagcactggggatttcgtctatcttactagccttactactcgtactatgtactacaacatttgtactttgtcctttttccagttctcaatgttgaactgggggaaatactttaataaagatccttctcctattctaggggcccatcctatctcttaccacgagtcaggtaataactagcctgttctacgatgtgcatcgtacatttgacggcgggatcttcgcccctctgtaactactgcatgaagatctgtggaatacacgaaataaccacgctgtgtagcttctctgctaaaaccaaaagggcagtctaagatccaccttttcccactcatttcccaacaaaaagaacaaacgtgataccgcacgctacaccgggtgatccgacggggtatgaagccgtattggacggtaattaccagaatacgatcctggaaacccagcggggagaaacccaaaacgggccaatcagcgcaacacaattttccatcaccaatatttttgtgggacgagttccctcagagtgcaagagtcccgagaaaagaccgcgttaactccatgccttgccccaacgaaagacctcgggaaacatagcgaggtccaattccaattccacaaggagtctgttgagaaaatggtccgcaccgaggcggttgtacaagcaaaacgggcaaaatcctatgcggcccttatctcttaaatatacggactacctacaagtagactaacggtgcgccacgcgtggcttacatccttttcggacgggcccgaacgactatacgagcattattaatctcaaaggtcgcgagcaaaatccgaggaatagaacgcggctagatcgccacggctctcaatactgccttgctagtcatgtcgattgcagggaggggccgccctctttagcctcggcatttgttcggtatagtcgtcagccatgttcctggaggtgaataattatcgtcggtttcgaatacgcagttaagagtggacgagcggatcattgggcggagcagggtgcggaagatgaagccagtcctggcttgtagcccactatggcttacaacatagcggcgatcagcttattttgagaggtacaacctaggcaggagatgagaccacctccctgttagattcctggggaagccatctccaggaaatccaggatgtctgacgagaattcccgagtctatctataccgccttcttatacaggtacaccgcccttcttattcaagtttaactggtggacaataacatttccggcaaaactattatcggggtgttaacctggagcggaccggggtaagggatatatatagccgacaaaaacacgggggactttcgtcatggcgtattcgaacattcttgcttttattgttcagatacaaaggtgccacttgttaacctcagcacgttgacttgaggatgttctagggtctatagtggttaactacacacacacaccacactggtattgagtcagtcctttatgataggaacaacgtttaacatttgcttaaaaaaagcttcaactctatacttcgtctgcatcttccatttttgatatgcttatttccaaccccctgtagagttgatagtcatgataagagatatttgggttcgatgttgcgggaaggcgtcccccttggaacctgcttatgattctcagcttccaccgtctgattgaaattacaacattttttttcagtagacggcctgtttgaccagtgtcactctatccataaaatgtacggcacaaaaggcgcaacacgcgcccttcattccaatacccggcggttcaccactaccactcgactacaagcaccatcaggcctcaagatcaatccggagcgcctatggaacacactacacgagacatgtaaatggggtgctgagcatcgctatggcgagtatgtatctatttcccattcggtcattgaacacaatctaacgacataaaagaaacccaacagatacggggatggctcgtctcactctcaacgatgacgatgcccgtgttcgtcggtggtttgccgccgaagtccagaagttgggctgctctctttctgtagaccagatgggaaacatgtttgggcggcaatcgggtcggttgaactcggctgcgccaatgaccgcaatgggaagtcatctcgacactcagccgcgaggtggtcggtatgatggtattctcggtattatggctgcgcttgaaattcttcggacaataaaggaaagtgggttccagactaactatgatatcggggtggtcaattggaccaagtaagcatcaagatttgttttatcatgccatttaagattgtcactaacaagttcatagtgaggaaggtgcacggtttcccaaatcaatgtgttcctctggtgtctgggctggtgcgattccaatccagaaagcctgggacctgcgtgatattcacgatcctcgtgtgactctccgctccgagctcgaaaggcacggatatctgggcgagattgcttgttccagcgatccagtaaccggatacccactcggagcccacttcgagcttcacattgaacagggcccaatcctcccaggaaacaaccgatcaatcggtgttgtccggggcgcccagggatacagatggttgactatgaccgtccacgggaaagacgctcacaccggaacgacacctttcagtgaccgccaagatccattactcgcatcatctaggatgattgcggcttcgcacgacattgccatgcgacacaacgcgctagcttcgactggtatcattcgagttccatcgaacgcgtctaccaacaccgtctcatcgcaagtgactttcacgcttgatatccgacatccgcaggatagcgtggtacacgccgtgcaagacgagtgcctccaggcgtttgaggctattgcattgcaagatggcaagggtgtgtcctttgactggacgttggatacggactcgccggctgtcgagtttgacgataattgcgtagcgtctgttcaggctgcggcggatcagctggttggtcgtgagaaatcaatgcttatgaccagtggcgccggtcatgatacggtttatactagcaagcgctgtccctctgcgatgatctttgttccatgtcgggatggtgtgagccaccacccgacggaatattgcagtccgcaggattggtaagtctttcttgtttctctggtgctttttcgaaatctgactgttgcagtgctttgggtacgcaggctcttcttgaagctgttgttcactatgatcaattcaggatagaggctgaagggcaaaagtaatcggtagttcaaatgtatcggcattaaactagacctagatttaactacggagtattctatgataatttcatctttagacaaaaagaatatatatcgagataagaaacgccaaatatcgttcttaacgacagaggccacaaatgccaccgactattcttttacattaaattcccaaaatatatatcacatacatgttgcggtcaactcgtcctgcacagagcagacgtcaatatcgtgagaaggtggagtccccacttaacctgccatgtccgcagaaggcgcaatgtctttagaaggctcacgataagaaatggttaggtgatatataaagtatttgcattaagcccacatcaaataagcatatttacgcccaccaacatgtcatcacgaaggtcgatctacttcaaccccgcggcagcaaatgagagcagtgccgccccgcaaatcgaaggcctaacagcattccaccaatccttcccgaactatgccccaaccccactagtccaactcccagagctcgcagccgagctaggcatcagcaacgtcctcgtgaaagacgagagcaaccggttcggactaccctcattcaaagttttaggcgcgtcatggggctgtttccgagcaatcgcagcgcaactgagcctgccctctacggtctcgctcgatgaactctccagccgagcaaaagaagcctcgattgtcttgacgacagcatcaatggggaatcatggacgggcagttgcgttcatggctcgcctcctcggtatcgaggcgcgggtcttcgtcccccggtctttgaaccagtggactcgggatctgatcgccggggagggggctcgggtagttgttgttcagggcgattatgaccaggcggtgcaagaggctgtggatgagacgcggatgggacagggtgtacttctcattcaggacacggcatttgaggggtatgaggatgttcctgcgtggatcgtggaggggtattcgactatgatgcatgaagtccagagtgaacttgctcggcttgggctgtcgggtagtgtggtgatcacgcctgttggtgtgggtagccttgcacaagcggtcgcgaagcattgcaagtcgcagaacacgactatatcggtagtcgccgttgagcctgatacggctgcatgtttatcttctagcttgactgctggaaagccggttactgtccggacttcatcgacgattatggatggtatggactgcggcacggtatcttctacagcttggcccgatctacagagtctgattgatgcctgcgtcactgtctcatcctatgagagccaccgcgccgtgcagtatctgacttccaagtctgtggctgctgggccatgtggaggtgcatcgttggctgcacttcgacgattggccacatcaaaggagggaacgtcacttttgaacaaggattctgtggtcgtccttctcagcactgaaggtgcacgcgagtacccagttccaagagacgtctctgttgacgatgtcgtggagctaactcaaactctcactcaaatcaactcttccaacctgaccttgtctgtaacagacggagtaggtgagactgaaatcgcaaactatctggccgcctggttcgcccatcgagacattgagtatcattggattgagaaggtcgctgaacggccatctattgtgggagtcttgagaggcagcggcggtggcaagtctctcatgttcaatggccacacagacaccgtcagtctctccagctacgaggcagatcccctgtccgggtcaattggaaccaagaatggcaaagaggtcatcttcggccggggttgcctcgacatgaagggagggttggctgcagggttagcggctcttgcagcaatcaaagcaagcggtcgcgtacctcggggcgatatcattctagctgcagtatcagacgaagaggatgcctcacagggaactcaggatgtgctcgaggctggctggcgtgctgatgccgctgtacttccagaaccaacgcaaggcgcgatatttactgcccataagggattcgtgtgggttgaagttgatatcctcggagttgctgcccatggatctgaccctgtatcaggagaagatgccatcctatatgccgggtccttcttgcagggtttggaggaataccaagcgcagctgccagtagatgatctcctaggacagagttcgctacactggcctaattcggggtggcgaagagccatcgtcctacccagacaagtgcactatcactgtcgaattccgaactgtcccagcacaaacggaacagtccatcctaagagacatcagcgcgctgctgaaggaaattgcccagcagaagcctcgtttcagatacggcgagccacgtattaccatgtcgcgccctacacagaaagtggcagctgatcatccgttcgtgcaaaaagcgatttcttgtgcctctgatgttctgggcagcaagcctgctgttaaggctggtccgttttggactgatgcggccttgcttggtgctgttggtatcccatccattgtgtggggcccggcaggagagggtcttcatgctaaggaggaatgggtcgaagttgggaatcttcgacagtttgagaaggtgtttactcggcttgtgcaggacttttgttattgaatatagacgtctgtatgtaagtactgtttagaagaacacacatagattatttttcaaagtttcccttgtacctatctcacaacattccaactggaaatactacttactactgcctcgtgcatttgatagtcttgtagtcggatagatcgtggtcgtagtccttgcgatcattgctacagtcggtctgaccgtctttcgtcagccgttcacctcctttcggtacttctcgtaggtacttcacgtcgttctgtttagtcgctctagcttcgtagggatgttaggtcgcttgctttcgtcgaggtttggatgaatataatcctagttgccgaggttttcggtaattgctaccacctattcaaactaatacagcccaaagaaagtattgataaatgggattattcaatagagacagtcaaacgtggtactagttgattcttgtagagcaagtgttgtgttgtggctggtgttcttatcgccacgggactacacagccagagccgatccagatcggccaccttcgcctgacgacatcccactcaaaatcgactagtacacccatctcgttgtttccattccaagcaaattgatatatattttcttggagatcccgcaacgatggcagacgaatcaccagcacagcgatccgcacgagtgcgccgagagcgccgggaggcaaagatcaaggaaggaggatcagcacgcctggacaaaatcaccagtctgagtggacgcacgccacaagctggtaagaaatgaaatttccatccccggctctagccaaagagctcctgatagcaaagcagacatacaatcccttcagcctcgccagtacaaacaatgctaactgaaatcaactacaacagaccgcgacgaagcctcctccccccagtccaagcacgcaatccctgaatctccctccccaggacctcaaaccccccagctcggactctcaccctcgccccaaccagacctgcagtcccaagaagcgatgcgcgcccagcagcaagcgttcttctcaatgctccgacaatccgcaccggaacccaaccagggcatgcatcccgacccacaagcgccaaacagcctccaggcccaacaagaagccttccgcacgatgctgagacaaaccacacaagaccaaggaccggaccaactacccgacggcgaagaccccaccatcaagctcctgaactccctcatcggcgctatacccggcggtgacccgaataccccaggagcacccccaacaggcgcaggcgcaggaaacccacttacacccggattctcgcccgccggcatcgcaaccatgctcggtgtgccgcctttccttgccaatatgttgaatggagcgccgccgcctacggaggcggagcagaagcgcgctcggatctggaagacgctgcataccgtttttgctgtgacggttgctgtgtacctgcttttcattattgggtcttcggttgcgttgttcggtagtccgccgccgaagcctgcgaccgtgcagaatccctttgctatctttgtgacgggggagttgatgttgactgggggcaaggtgttgcttggtgggaagtctggtggtatcgggatggcggtgcaactttgcaaggatgtcgtgagggatggtagcctcctgctgtttatcctgggcatggggacttggtacaatcgcgaatggcagactacggtgtactagatggcttgagtatgtgcggagtagcttcgttaatgatcagcggtatgagcatttcaatgggatatattttgtgatcattatttcattatcgtatgttgtatatcacttttgatcgacgctaagcagacatgttgaaggcccgctgagacggcgggaccgcattacgtagaacacgcaatgccgatgcatctaaaccccaatcaccttcccattgatccatacgggctcctttcttgaaatgacgcgccagatgctccgcccgatctgaccaggtggacagcgaagatccacagaatccgcagcggctttcgacgttggcggtcgatccacgccaggcttcgaggtcagccacgggggctttcgtgcaaccgtggaatttgcgcagatgctgccatagataatcctttcgactgaatgaccgctcctgagtaggcttatcggcacagacttggaattcatgctcttcccaatgggcgaacgttgggaaaaggacgtcgcaaaagggacattctgaaaactggcgttcgaacgcttgttggacgtcgtggggatttggagtgcagacccaggagtcaagggtgaaatggacacttttctcgtggcgggcccagtcgtgtttcttcttgaaggactgtgggcagaatgtacactggaagggatggtctaccgccgttcgttgccgtcctcgggtgcgtctgagtttagtttgtttggggagtagtggaaatggcagccccgtgtccgctgaggaatggtagctccatgctgaagaggcgctatcggatgtttcagataccttgctcccgatgctggatactgatgacgctaagtgggacgagctctcatcaaaattgaagaaatccatggtagatatgtcgagctgcaacgggtcgatgctgtcggccgagtctatcgagccagaggaaatggcattttgaatagtcgcttctggaataggttcatcttctggcggcgaagcccgccatcgctccattggggtcagggaggacagcgtgctggtgaccatgggagaccccgagcgagtacgggatgtggaagcaagacccgcagcctggatcttttgcttttgacggcggcgggcgtttgcaaaccaggttgatatgcgtttctgggagaaccccgtctcgtgggccatctgatttttttgttcgtccgttggataaggatattcttgattttgatagaaccactcgcggagaactctagctccttttctgagaaactgtttgggttctttttgttgatggccattgtccatagtagcagcgggaaatggatttccatcttccgggacaccgtggagatgaccaaagaccggagagaaagtttcaaatcccgacggttggcgtttctctccctttgctaagctgcattctcgaaaaagggctacacaacttgagcaggagttcttgggattgggattggcaggtgcagtgcgaattatcagacactgtagccgatgcctgcgacaatgggcacatgatacaggaggacgatatgctccatccagccactgcgagacatttgtaagacttcgttgcgaggatgggccaacagattctcttgctaaagagggagcggaatcatagacaatttcagaagccttcaattcctcatgatcttgatgtccaggttgtgcattgacggtttgtgtgaggtgtgactcataattcgtccactgcgaccattccagatcactggtatctgagggaaacgggaattggtagtcagtatttgtatcaaaagaactctctttgccccattgggtgggctcaatttcacccagcaagccctccagctctatgtctgatagaggctgcgacaacggctgccatggtgaagggttgatcgatggcgaccgtgaagtcatgccatatatcgatgaacagattcgccggcgcagtgccccttcttatatatctctaatcccaagcccacaagtagtttggctagaacccgtcgcgtttatgcttcgcagtgatctgccaatatgatggggtcgtcaacaagtccacgctaatccagattaggccaggaacgtttctctccgcactagtcctaaaacggcaggtgcgcacttgcctagatgagttgtgcatattactaagctttccgcccccgaggcccgtggacgaatctcgggaacaaccattggatccgccctgcatctcggggtctgtgacctcgtgtttcctgcgcctactcagacttctctagagttgccttgccgactacttcctatctatctccataaatccttcgaggtttcagattacgcacgaggttgtgattgtccaaagttcctggagtcccatccttctaccatcatcgtacttggttgtacctaaccgagcacaattgagcaaatcccgaagagatggcatgtttggatggaacaatcccaatctcatggtctagcctccaaagatgtgtttgttcctaggcggctccaataaaattctatggaaatcgactcggaacgttgcttatcagaattaagcttatctttatgttattgcaagaccaaacacttaaagcttggttcacatagaatccgtattaggcaggacgctaagtgaactctatgctgtgggggataaataaacgaattggaacgggcggagaggttgatatggcattgatgacagtacaacggagccagagataggatattagacccggggtagatatggaggaatatgtacataacgcgactccacagtgggccgcaccggagttggccttatcgtccgtagttcggacgggggcgttttttagtcgccactcggtgagagcgccaatttatttagcgaaaactcggcatgcacccgattcccggtgaagatctagtctcgggaaaaaaaaggctatctgatataaaattaaagccacaattcgcagcctcttcagacgtacatcgatcggtgtatacaaccttctccagcgttccccagcaaataataaaccttaataacatgactggccgagcgctaacagtttctatgtgtcaacgatcaggcaatttacgctacaatgtagtatcaagtgggactgggggtggaactggggcaaaactagctttcatgagcaatgagctgaatttccataaccaaatagaatgagtcagcaaggcacttccggcaccgacattggccacacgctggtcagatctccggattcggtccgacctgagacaggtcattggtgaattcgtcgcgttgcatcgaattttctgtggaaccttccatttagtcctacggggccgaatttctctcgcgagaaaatggggaaacaataagatggccagaattcccgcctgggtttgtttctttcctcgtgggctttaaacatttcttctccatcttcaagacttgaactacacacaatggaggtcaacacagcaccacccgtctatgagaatgacaagatcgcagaacggaaagatgaattaacatacgaggaggagggccccatcaagactggcgaagtccacgatgcctttggcaacgaggagtacgctgacatcaagtataagaccttgaagtggtggtatgtactatcgttgggaaaagagcctctcgattgaccgtgctaacacgtcttcaggcaatgtggcttgctcatgatctgtgagtcagtctcactgggtgtgttgtcgctgccagcagccatggctaccctgggtctcgtccccggtatcattctgattatcggcctcggacttctcgcaacatacactggctacaatattggcctcttccgtgaacggtatcctcatatccagaacctgggtgatgcgggtgagattttgctaggccgcttcggccgagagctctttggtactggccagttcctcttctgtatcttcgtcatgggcagtcacatccttaccttccgtgtcatgctgaacaccctcaccaaccacggcacctgctccgttgtgttcagtgtcgtcggcatggttatctcaattctcctgtccatgccccgtacgatgaagggtatgacctggatatcgttcctatcattcctcagcatcttgagcgccgtgatgatcactatgatttccgtgggtgtcgagaagcaccccggtcgtgtcatccacgccacagtccccaacgacctgtacactgctttccaggccgtttccaacatcgtcttcgcttactgcgcccacgttgctttcttcggtttgatcgccgaaatggagacgccccaggatttcaagaagtccttgttcatgcttcagggctttgagatctgtctctacctgaccgctgctattgtgatctatttctacattggcacagacgtgcattcccctgccctcacttccgcaggacccctgatgagcaagattgcctacggcattgctatccccaccattgtcggcgccggtgtcgtcaacggccacatcggcttgaagtacatctacttccgcctctgctccaagtccggtctgatgcaccagaacaacaagcgtgccgtcggtctctggatcggtcttggtattgcttgctgggtcgttgcgtggatcatctccgaagccattcctgtcttcagcgacctgaacagtttgatcagtgctctgttcgcttcatggttcagttacggtctgtccggtatttactggcttcacctcaactatggtcaatggttctcctctccccgcaagatcgcccttaccgtcctcaacatcttcattgcctgcattggtttggtgctgtgcgttcttggcctgtatgcttctggtacggctatcaacaagaactccaacagcaacagcttcacctgtgccgacacggatacttagatgaccttcttgcttcttgtttcatagcgctagaccttgttaacgttacacgccctgtatatatactgcatatagattatgctcggagcgcactggctgactctagaatataaataattgattaaaaattctcaactatcttgcttgtcctgattgtagttagattgtagttagattgaatcataagagcaagagaggtgatccttaccataccagaattcggtatatagacctgctacctatagatatggaagtcttccaatggtaactagctctaagcgattgaccttgaatacaggtttcgttatatactcatattttatagcaatgttcacttaatacatggtctgtgaagcctattctattccaattcagcatcgggcgtggctgagtttgcttggatgtaactagaaaagagatgaaagaggttagaagaatagcaaacatggcgtgttagaaagagtctctagatactttgaagtttatgttgaagaagtgactaggagttgacaatgagatgaaagctcttctattgagcaatgtttgctaaagccggtcattctcactctttctaagtctacacctacaactgccaccgtgaccttcaatccccctctacttcttctctccctcacacttatccttcctctcttctttcacatttacctcaagtcaacaatcattccttttagagtgagaggtgacattcatcactcaaaattcaacaggacagtccaccaacaggaggtaatatttatcatcaaagcgtctctcaaaacgaagacgatgatttacctcaactaggtgtaccgagatggattccaaaacacctcagatctcgccggcattagaaaccctaccatttgaaattcgacgtcatattctttctatggttgaaatcgacagtctcaagaccctcgtgcgagcctctcctgtttactttcaccactaccaactagaacgcaagctcttgctgtgttaaagcctggagtcgacattgggtagcgtgactgctgatgcctatgcagtccacaagtctacttccatggaatgttcaaaaggacgggatagcaaaggaattgatgattttctgacatcctaccacacaatgaggtctcaagcctggctttcacctttccacaacattctcatcatggaagaggtcgagacaatggtcaaatttcattgctcgattgttcaacccttgatgcgatgctttgtgagagaagcattgactaatctcaccgagaagacaaacgagtctcagatctcagatcgaagagactccgagtacaacagaagagacaaaactgatgcgcgggttttaccgattccaactctgttgcaacatctatggcctcgaatcggcggaatctatcccctatgttagctggatttctatctcccagcgcattctgggagacttcttgtgcatctttgacccttgggaggcagaagagatatcttgcgtcagttatttctgcgaagaaaagtgcgagcagatcttcgatcagaccaaacagggcctggatgaagagaactccggaatcgatcaacctgacatatccgatattgctagcccatgtgagtaggaacccactagttttgaagctcgcaatttgagctctatgtgcgggtctgaaaataacaattttggctttgaagcaacagccaagttgaccaggaatcgtggcctcgagctgctgcacttggtataccccatcaaagaccaggaccacttggtagttacgaggcagttgcccccacccatgcgcccgagcggcgttctcagtgatctccacagcgtcttcgaacaacacttacaatggcatcgacactgcgttcaccctggggaacgcgaccatcgacaggagcgccgtgagccgctcattttccaatgtgacaggaaacccgatggaagttgcgcgctcccaccgctggcctggacgataatatggggtggaagttacagtaatctctttggggagtacatccccgacgcttcatgtgaatgggcatgggttatgtgggacgcagatcgacttaagcgaatgagtgctttgggggtgattatacaggaatgggagaaggagcatcatgatgaccctaggaaggattacttgtgaccggcactctatgaggcgatgtcgatatcggcacacacgacgatctgcctactctttcttattctcagcctcactcctatcgtctctcctatcatcatcatcaagattccaaaatcaagatgtcgcgaatcagtggaattgcatcttccctttatgtccctttatgcctcaaaatcatcaatgatgggcagacctattacgactttgacgccatccagccccgagggcgagtcggtcatgtatggtgtttggaactctatccttacctggcaattctacttgcccgcatcacagcctccaattcagctctcgtggcttttcggatttcgaagtgcactaatatatttctctggttgtgcaatgcaagtgggaattcggtagttatatatgggacagtccgagagaccaactggaaaaataccttcaaccgattcatggcgattctgagtccagtcctaccatccacggaattgtggccattggagaatgagtcagatctacgagtacgacagtatcttgtgcaaatggcttcatccagctacataactagctctctctgtttgtttgtataatcattcgggcccgaaatccttctttctctcccggttttctgagcctagcatcaatattaatggagccgacgtggccaccatactaagggtagttgaagattagagtctggaaagatccaatcacaatgtgtcattctcaagctacataatcccagaaagcgaaaccccctcggctagttcatctgtcccatcagtatgtaatggtaacattcttgttcaaatacttcgcgtctatcttcaagacaaggttctcagcaagccacccccccgcatcctcccgggagatagtatagccaatagccctacactcaggaccagtcttgggatcctcgatgcccacacggatagtcttgtccgactcgccatcaacaaggtggctcgcacgaatgattgtgaacgattccccgctctgcgcgaaacggtcttccatgactaccttgtctgctccggggacgctgacaaacaggtaatagatgggtatcataacaaaaggaacgtcgcggccgaagcgcgagaatcccgctgtactgcacccaattatgtgtggagttcccgtaatgccggcgcttcgaagctgggcgagggcatttaggatagttgccgcgcctttcttgcatacgtctggatcgtcgacggtcattctgcgtggcttcgcacctatggtagacacaatgacatcgacgatgtggccatcgtcggtttggaggcactgcgatacggcggagatatcgtgtgcattgcccttgatgactttcagatttggtgttgactctgaagggaagatggttgtgagtttcgagggatcacggcacagcgcaatgcatttgtggtccgcagcgagggtgcgtttgagggcagcaaggccaacgccggtgctggcgccaaagaatgcaacggacttggtttttgaggtcatcttatgggctgtggttgtgaaagtagcgagatattggaaggctatcctctgatgttgatagtggaggcgagctggatgttgttcctagtgtcttggaaggggcgatgggcttcataatatacattttggctgacagcagaaagcgaaaaatatccgagccaacgcacaatgcctcgctattttctcgcgacttgcgactcgcaactcgtattacaatgagggggagaacacgaggctaaccaaatgaggcggaaatgccgttctctcgttggttgtcgctcaacctacactactgagtcagacagccaactcttccaggccttaccatttgcctaacgagatcaggataatgaaggttttgcttgatccctgtctgattgatcactcactggaacaagcccatcacggtcccaggatgcccgaggagcctcctgtcacgggggacgcgctcgcttcggcctcggatgccgagaaaaacgcgagtttcgacgcctcaggcagaaacacaacatcgccgaagccgcgcagctgcgttgtatgccgaagtcggaaagtccgctgcgacaagcgagcgccttgttccaattgccgtcgcgcaaatatcgcttgtgtacttccaccaacagaccgtccgccaagatgggctcgccacctcgaccgcctcaacagcgcggtatccaacctaccggccttccaaaaacccgaagaagacgtgatggagaaacttcacaaccttgaaagccttgttcaggagctacggattcagctggaacaggctaaatcagcagctaactctgccgaagggtcatccggggttggttcgcctgaaagctccgcgcatgatcgacagtcgaacccatcttccattaatactgccagcgtgcaaaataaattcgggagactagtgcttcgggattcaaaccgaagccgctatgttagcagtggcttctggtctcgggtcaatgacgaggtatgccgccttggtttgttatggagtgaatggcgagttaactcctactcagcttgatggcctcagggctgatgttcgtgatcttccattaggggaacccgatacctcggacgatgaggcatcgcaggagatggtcccttctacacaagaacttgaacggacccctggagagcgtcacggattcttgtttgggcataatttgagtcctttttcttctaacctaagtgaccttcatccactcccttctcaaattccgttccttctagacgtgttctccgaaaatgtgaacattatctttcaaatagttcatcttcccaccgtcaagagcatggttcgcgattggcgcggccgtgaaatgaagggtctcacatcggccaatgaagcattgatgttcgctatttactacgctgctattacatcgatggaagaagaagatgtaagtcaaattagattttgaactttcggacggatccaagcatgcgggctcacgtctcgggacatttaggtattacttaatttcggagccaccaaagccgagctcaatctcaaatatcgccaaggcctcgaacatgctcttgccagagctgattttctgaatgcacctaagctagtcctagtgcaggcatttgtaatctttctgtatcttgctcgccgacatgacagtccgaggtttgtgtggatgatgacaggactagcgatccgaatgggccaagctctgggactacatcgtgatggaacacatttcgattatcttagcccatttgagattgagatgcggcgaagagtctggtggaacctttgcattttggatgtgagagcatccgacgatcaaggaacagattacacaatcacaggagcgagcttcgatactataatacctctgaatctcaatgacatcgacctcgaccccgaatcaaagcagacacttcaagctcacgatgccttgactgatatgtcagttgcacgtgtctccttcggcatgtgcgaggtcacgcggcagatgatgggtcatggtttcaaagaagcagcaccaagtctagaagagcaaagtcgcttgttgcaaaaaatagaccaaggtcttcaacgggactttctccaatactcaaccgaatcagggaacattacatactgggtgatagttacggtcgctcggcttcttatggccaaaatgactctgcttatctacctgcctctgttgttctcctcctcgaatgaagacttctcggaggagctgagaacaaaactgctggtttccagtatcgaggtcgccgagtacaatcatgccctgaacaatgaacaagcatgtagacactggcgctgggctttccaaacctatacccattggtactccattgtctacatgatacttgaaatctctcggcgcccgtggtcgcctctttctgaacgggcctgggtagcccttcacagtgtctggctaataccgaaccagacacacatggaaagggatttccgcatctggatcccactccgaaagctgatgaccaaggctaggaagcatcgcgatatggaattcgggcgactgagaagcgactctcaagctgtcgaacagctggagcagagctattttattgctccactcccgtcgagcactgggccgtttccatctgattcaaattctgcagatctgttccttgaccaatggctccagctagtggcacaacgggatagaaccaaagatgaagcactcacatcagggctcgctatcactaatacgtcgaatccaccgatgcaaaatacaagcacaacgcagtcaagggtgcgttctgctcccaatttatctcaaacattctcctcggctttcaccgttgagccagagtatctcgttgcagaagaacggcatttcgggtacgaagtatcaagcattgaatctacaaacttcgactcagtcatggcgtctaatgcaggactcggattcggacccgaaagctctgctacttcatcacataatcacttctcgatggcaacggaagctcaatttgacggtcaacttgccaccccagctgttgtaccttggctgtggtctgagaaggacatgtcagctgatttaaatagcatctccgaagatcaagccgggagtaacatgggcatggatgaggaggtggattggtacaattgggccgcgtctgcgaaggatatggagtgtgatatggtgaattatagtagtggaccacgctagcctccagttatacgcggggctgctggtatccacctcggttgtaccttgattctggcattttccttccttaaataggttattggttctggtaacagattctcgatctgataattcgttctaacgccttccgagaatgtggatcttgatggtggatatttgacggagaaactgaccaatcaaacgagcccagcgaccatcggagcatatatgcgcgtggacgtaatacgaatcaagtatctaaggagtatcaaaagtaaagaaagaacatcaaaagctagagggtttactgtgctcaaaatggtgaggctgaagaaattgatgccaggtaccttttgtatggcccacaccccgcaaacctgagaaaatggattggattcatccaattcccctgaaccccgccaagacccggggcttgggtaacgtggctgagtgtcccgagatcggacctcgaggcctgataggtggccaggtgagaagctcgcttcgagaaaattctagtgccagtcttgcaataaccttggaaagctaaaagcgccacagttggattttactttcatgcacaattactttaaatcttcgagctcctcatgagaactggtcattttagaggaaaattgtagaatctggggttgaacatggggtaaacctaatacataaagccttgactaacagtttccaatagcgttatcactaaggagacaatgctcggggccgccgacttaccatccggggtggttctatattgcacgccgggccgggtgcgccgggccggtacaatctgacgccgggggcgcataccgcctacggaattggctcgcggacgccaaataccccacaaacctggcatcggtcaagatattaggtaatcattccccggtgtcgcgagccaaacccatgaacgcattcttcaatgccatcctcgaagttgcgatctcattggcgatttaccccggagaacaccccggagtaaatttgagcgagttcgggatttggtaatgactcgtctccccacactcactagtatatcaattagtagtactccatactatctggtaatggaatattctgttaacctttagtctctcacgccaagcaaagactctgggccaaccgttctttttgggcctccactagcgattttcggtgttttttctttcgcccaaaagtttttctctcttcacttctccatatcatataccttccaacatgagtgtccccgaagcaccccatcctattcaggactacgaagtgtacaatgactcaaccgacatggagaagaaggcgtacccggtcgaccctccggacgatccttttgggaacgaagaatctggggaagtaaagtatcgtattatgccatggtggtcagtatctcactctgtttactatttttattgcatcaaagagcacatttctgacttttatatacaggcaagctggaacgtgtgagagcccatcattaaccctagtcaacaggaaccccattctaacactgttcatgtagtgatggttgctgaaaacatttcgctgggtattctatctcttccatccgcagtagcaaccctcggaatcatcccgtaagaaaatttctacctccacgatgcagaaagaaggctgacatctcccagagcatttgtcattattatgtttttgtccgccatctcgtggtacactggatacaccatgggccagttcaagcagcgttatccccaggtccacagcatgggcgatgcgggcgagcttcttctaggccctatcggacgcgagattttctttgtcggccagctgctgttcatcatcttcttgatggccagccacattctcacattctcggtgttgttcaacaccatcacgaaccacggtacctgcactattgtatttggagttgtcggcttggtcgtcagctgtgttgcggccctcccgcggacagcagagaaggtcttttggatgtccatcatctctgccatcagtatcctggtagccactatcgtcacgatgatttccatcggtgtgcaggcgccctctgatgtccagaacgatatcgtcgcgaccccgaccttccaggaaggcttcttggcggttaccaacatcgtctttgccttcattgctcacgtgtctttcttcggtatcatgtcggagatgcaggatccccgcgatttccccaaggccctcgctatgctccaggttatcgatactactatgtatgttgtgacggctatggtaatctactgctatgcgggcccgactgtcgagtctccggctctatcgtcggctggacctataatgaagaaagttgcctatggcctggcaatcccaacggtgtgttatatctccttgcagtcgattcgggagtctgttctaatctctgataggtcattgttgccggtgttgttttcggccatgttgcatgcaagtacatctatgttcgaatcttccgcggcgatcgctcccaccacatgcaccagaagactttcttggctacaggtacatgggtcgcgatcggcctgactacctggactgttgcgtgggtcattgcagagtccattccagtgttcaacgagttgttgagtttgattgtatgttctatactcatttattaccgtgcgtctactaagttgttatacagagtgccctattcggaagctggtttagctgtaagtcgacttctgagactaagattgatgcgaaatagattactgactgagaacagacggcctccctgccattttctggttcatgatgaacaagggaaagttgttctcttcaactagaaagatagccctgactattatcaacttggccattcttggaattgcttgtactattgtatgttttgtctctctgtgtgattctgaatttcctgctgacaagaatagtgtggattgggactctatgtctcgggcgtggctatcaacgagagctcgtccaatgccagctggacctgtgccaacaatgccacctagactcagttattaccacggtggatatatgacatgtttctggtgttgaaaatggttgctttatatatttgctctgggaagtaaatatactggtgttaaattttacacatatactttgcatgctacaggtgttgctcaatgtctaaagggcttttatcacttgaaaatacaagatgagttctcaccaaacatagtatcacattcttctcttgtacaaattaatctataagacgtcgtcccctctaaactcccgccgaacactgatgtcatcactggtgcactattactaattgtgctttccaccgtggggaggcttgccactgtgcttcgcctctgacaagcccaggcattccgccatgttgaaaaatatgtcaatcgagctgtaaacacctccaaacagctcctgacacgggccacgggcaaagactggcacatccgtcaaagagtggactccctgtcctgcatcaaggggaagagttccattgaccatgaagccactcacggcatccttgtagttggcaacgtatcccttcttcgtgtcctttgtagcaggagtacggggaccctcgctgtgaacccggtaatcctcgcggtgatcagggaaagtaacaacacccgcttgcagggtgtatcgggggtcccattgggcagggaagtggacgccttcggagtaccgcaaggcattggatccggcgacggtgtattgcgacaagccggagttctcatagtnnnnnnnnnnnnnnnnnnnnattgcgacaagccggagttctcatagtatccgaccgcattgcgcttgctgcggtcgtcctcctgcgcctccatgtactgcgtgtcgacggatccggtcacgtcgaaaccgtggccgtggtcagctgtgacgatgatgagggtgtcttcgagctggccaagcttctcgagtttctcgattgttgcgcgcacggtatcgtcgagctcgagcagctcgcctagggaccggtcatagtccagagtgtgcatctgcttgtcgatgctggcggcctcggccatcaggaaccaaccatccttgcggtgtcgcttgtggagcacgtcgattgccttgagggtcatgtccttgagtccggggagatcatcagcgtcgcggtctgaaccgtcggggtagttgctctggttgtagaggttggactggtagacgttgcgatcgagccaagtagcgagattggatttctggaaaacacccagcagcttctcgttgcttggggcgctgtgcagcgctgtgttgttccaggctacgttgtaacccttctcggcgaacagcttgtagtagtcacgcgtttcctcgctctcgaggaaatcctctgcaccggcaccaaggagcacatcgggaccatcccagtttgtccactcgtacttggtcagaccttcgtagtatgagccgatgacatggtcgtattcgccacggtcgctagtgtgagcagcaagaccggcaggagtagcatctgccaaaaaggcagttgacacaatgccaataccggaaccggggtgctggcgacggaagatctctgcgattgtctcgaatttcgggtcatcgaaagcgtcgctggaggagtccacatagacacccaaagcattgacggtagtcttgtgaccggtgtaaagggccgttgcggagttggccgaatcagtaatgaaagagtccatggagtgtgtcatctggtgacccagcacagggaacttgtccaatgccatctttgtcatgtatttgccgttgatactgcggtgggcaatgagacgtgctgcagtaatcatgttggtggtcatgccgtctccgatgaacataacgacgttcttcgcgcgtctcttggtaggaagatcacgaacaaaccagttggcgactgtcttctgctttccgtagtaggtcagagtagcctcgtattcgccgggctcataaagggcgattctcctgtagattttcgaggtcacattgacaagggaaggcgtgtctgcgtcctgtgcgaatagatctgttccagttagcttaggcgttccccgagagctgaatataggaagtcattaccttcataccatgtgaagttccacttttccaactggggttcatcaatcttgaagtactttgctgcagtgacagcagatttacccttctcctttccattgcccttcttggcgatggtgaaggtgaagttctcgtctggcgatccaacacgagcttcagacccattgacgggggagtgtacttcgagacggatgtcgaagtactgacccgctaggaagtcgaccctgcaaatagtaataagtggctagagcttaggtacaattgagacgttacatactgatcaggtgggaagatacatcccaagtcagggcaaccacccaaccgctggaaggtctgggctgccgcgaacgagacaaaacatgccagcgcggagatagaagaggcgcgcatcttgataagccgattgtgatgaaacgtagatattcacatttggagagaaaacacctccgttaaatacaagaactccgcagctgattgcaagcaaaccctcctgccaagaatctcctgccaagacaatctatagtggtatagacacaaatctccgaagtatcccagtcccttgataaagtactattgctacatcgtacatttctttatggggacgaataggagacaagcacgatctgcacgtgcgtaatcctggagtttacctgggaagcttgaacctccttgccaagttgagggaacggaatgccaagccaatccagccaaccccagtcgtccgccaagcttcgagggcttggcagactctcgcacgtgggatggatgggagatgcggtggaatcacgttctctttactgaaggccgttcatacgcctgggtcatttcctatgattggatatatatcaaatcgagaaaaggtaatcctaagcgctcggctgaaatgtccaatgtgagatgaaaatcaatagacaacgtagaaaatgagaatagatagcgcaacatggtgtcgtatagtgcgtctacaatctcatgctatcgtatcattggccctgtaacttcagctagttctcatctccgattcgcaccacccttttttcatatagagggtgggggacctcggctctcgcttgggataaacaaactgcgcccttggatcccagcgaggtcgtacgatccttatctagaagctgtaaagctatccgagtgccaaaagagcctgagtaccacatattctagcacgtgcccctatcatcatcgtcgggctcgttgatacacctgaggattttactgcattggcccggactccggctcatcgattagaccaaagctctgctcaccagattacctaagaatacacgtgataatcatgtcacatgatgggccggtgaacttagcttccaattattgattgcggagcgaagcgaagcaattaaatcataacctcgtgtgcagctccagaatcataagaagctatgcggtggaaagtcatcggctaactttggcagaataacccaaccggcagagatcgactaggcctaatctggctagacgataatttctttcaataccatttcaaaaccttacctttaccgccttctcaatcagttcccacggttcataataaccctcatttctgccagtttttcaagaatcaagatgtcaactctcaaatctttttgggggaaattgatgaaaatgagataaaacggtgaaaactaacaatttttcttcgaggctagcccgcctatagatagtaccttacgcaggataaaagctctacagagggtgcctggcctgtgatgacccggaatgtaactaagtgacttactttactaattctaaaccagccctaagcaattaaatcactaacttatggtgtagactaagaaagaatgggtcgtttatcctgatgagaagtggtgccgttatcctagatgtctacatcaagtgagtttagtttgaaacgattgacgaccacttgaagtagtttggaactaattctcctttactctagactaccttcaccaataccaatgggattaagcaccatattgtacggaaacaaatgactagtaatggcgatatcatgacgtggagtgctggtggttctccctctctggcttcgctccaggtggcaaatggtaagtaaactcgaagattagatctgatctagcttctgactagtttagacgatttccacgagctgatacggattcagtataaacaaattcatacagtttaagaggaacaccgtcctgccctacctttaaagcgcaatggcgaagtaagtattgccctgaactagtcctgacctagttcctgatttctgaatagtttaatggaactgaaatgcgtcgtcagctccatcagatgggtcatactggtgcctgcgtgtcgtgcgaagctgaatttgccaccataggtaagttccccctaccgctaacccttttcaaactagtccatatctaatttataactaatttagcttgctgtactcacgctcgtcgggatcagtgtgattactttgagtatttctctgatgaggggatattgcggaagataagttcaaagaactgatcctgacccagttttgactaccttgacctcggggctttatatcttctggtgtatgacctcccaattagatcgaactgcttgcagtcagcaaaaatggccccaaggcgtgattccataatattagcagggaagccctagagtctataaatagacacaacatatcttgctttttttatggtattaaccttagggctttgaaatcaaaatggacaatgaatcgactacttttatcggatgctcaagatgactgctagtattggacaaagaaacacctctttcaacgcttattgtactaaccaagctgtgctatgaacaattatacgatgtaagaatattttgataatatagagttttcattatcagtctttgaatgaatatactgaaatccgacttgaaacatggaacatacatcctcatagtttaaatttagccctttgattttcacgattctctcaagttcatctctttctctattgtctgattgatcccagttcaaagaaagccggtccaaagcacagaatctataagttctcataatttccaccaagtttgccttttgattaacgacacttgacaccgacaaagtactaatgccccttcaaggtcttggactgatatcgccttttttacagcaatcttcataccagtccaaggttggaatttctaacctctctcaaatgctatctccaactctcaaatacggcagtcgacaagcccttggccggctactacagcaatggatcgaaagcccagaatctgactcgtcggggggaatatgtccgattctgccttctaaactaaaattcaaagacctcaagaagtgcaagaaacttgaaatagatatacagatgcatccttatcttccaattcagattgaatacgaatttgaacaacatggaataatgggaccaaccggcggggcgtgggacatggtctccatagaagaacctgacgctccacgagaccctgaatacccgcacgttcatacctggaaaggacaaattgcgcctggggtactaatgattgaggaaataaagaaaatacccggtttctttatgtcggaagtctgccaggccatttaccagaactacttcccgattgatagcttgaagtatatctatatgatcgacgtttgcaataaagacactcgttcgtttgctataaatgagctctataccgaagccaatggctatacttgggaaaaagatacgattaattgcatacctggaaccccggaattcgaggcgctgctagggacaaaacttggacgaactgtggcacatttggttctgggggccttcaaacgtggaactcgtcggatttcacaaattaaggtctttgataactttgaagctttgcagttggagttttccattgttccgactgatgccccggctcaaagctcttcgactcgtagtacaaggtcaaaaacgcgccgcgagcaaagcatcgaatcgaggaagcgcaaaagagactcgagtgaagagcctgcgaagaagagactgaagcgcgaaaagtgaagaggcgatttttcttaggagttggatgtttactattgggccataggttcttgttcgtctttgttcatcaggtcactttatatatctagaggttttatgctcttgtaacgctgtgtaactattctaaatatgattcaactgttcttcatatggcaatgtataatgagcttacatgttagttcttcttttagggtcatctgattaccttgggcagccccttcccctttcagatcccaacttcccagtttcaaacaacaactcatcaatttaccaagtctaggacagccacggagtattcttttattctccttctaattcccatttctttgctgatcacagggtagctgaatggtccaatatcggctctttgttccgccgagtcggcggatttaccgcactatactcaaagctccttccatcgagacttaacagaatctttcttttttgaagactaggctcttgaattatagtatcttatgagcccaatatcttccgaccgaatcaaagcaatccatgcatcttcgcccctcatggcttccttgtcgttggggcttgggattgcagtgaccaaatcctgtaagtagccaatgagagatccctgaagttgacaaacataatgtctgacgcacttaacttagttggcattgctatatggactgccatcattactccattccgtggccaaaaagggggcggtacagcctacaagcatattgccctgtcttttcgcgcaccctctttcgaaatgcatccgtggagcagcttcagtgagttgaaatgttatcctaggatagaaacatatcttcaaagtccctggtctgacaaagaaacaattcnnnnnnnnnnnnnnnnnnnnnnnnnnnnnnnnnnnnnnnnnnnnnnnnnnnnnnnnnnnnnnnnnnnnnnnnnnnnnnnnnnnnnnnnnnnnnnnnnnnnnnnnnnnnnnnnnnnnnnnnnnnnnnnnnnnnaaaagttacgaagcccacatgagacaactaaatgcctcccccaacatactcgctcttcccgaaggtacaatggcatttcagcttggtaacgttgcttctgagaagttgattatctactttcccggtagcggctactgcctccccgcactaccgagtcacttcagctatctcgaagctctcttcgcggacataagacaatacggaaaaagcatcggtgtactactcattgtctatgagcttgcccccgacaattgcaacaggccgttatcgtgctacagtgcgccatccagacactgggaaaacgaccgtcaaacattattcttcagggtgactctgcgggcgctcatcttctgcgagcgctcatcttgcacgtgggctactatcacatctcactcacccacatcctcaagagatcgtgccgagattttcggttgatgagcctctcggaggagcgatgttgttgtccccttgggttgacttcagaactgatcatccgagctccagtgaaaacgcggataaagacgtcattacggctgagactttgaatagctgggcacggatatctctgggccagacggcggaagatgagtacaactgccctgccaaagcccccgcaggctggtggacagatcttcctgtttcaaaaatctttgttggcgccggaggagacgaagtcctgttggatccgattaggcagatggccgagaagatgaaggtgaggcggcttttacaatctttgcattctatctaacaacttgtcattccaggccgaactccccgacgtgagcataagcattgtgcctggagaattccacgttgagccaatcacgggcttcgctttgaagataccccctggattgcagttcaaggcgatggcgtcatggctgtaccagacctttctttcctgtgaattgcgaaagggaatgaagatgaagacagtaagatgcattgcctgcatctcacgattgtaggtgagtaggcggtcagaccgcgccaactcgatcagggttgggggctttgttcgacgtgtcgacacccgattttcccagaccttgactgcctaacttgtgtgagatatttcaattcatattcttaccactggtgttttacgtgaatagtcagaccctttcccttcagatgcactcgatccacgatccacatgcgcggcccgagagacccggggatcagcctcggaagaagatccgaaaagggacccgcagttgctggcaatgtacaagaaccccttgatacggatgatttattcctaacggttgttttctgcgataggcaaacatcgcaaagttcgttgtatttttgtgtctgatagcgaacagagctgcaaagaatgtctcgcccggggacttccatgtcgcagccaggaattgccggagcctgagaatccccgcgaatcggaccgcacatatctgaacgagcggatggctcgggtggaaaacctgttggagaagcttctgatacgagtcgacggtgggaacagtcaacagggggacttgaaatcacctttagatttagccgaaaccagcctcgaatcgagcccctcgaccgtgacaccagccccggacagtgctccagtcttgtctctttttgacaacgaagcggttcgtgcgataactcgcatcggtcttcaattcccggtagctcccgcttactagtgaatagataggtttcaaacgaaccgacaccgttgagtccgattttacgccatatggcacaattaatcgggactgggggagactgcgccgcgatctgacagcattgataccatctcaaaagacattgaaaatcatatcggaggctagcagtagctggtggcttatgcgcgtgcagttattcggagactacgatgaatcattgctttcgtcctcggagcaacagctttcaaatagccacccagctatggttgctaaggccatcttgtggattgcactgtgtctccaacaactcccttcggggtttgatttgtcctctcttgatctgccctgcctcccatgggtcctggttgaagaatgcatcacccgtgtttccacgctcgtttgctccgatgactctattgttagttgtatcgacgggcttgagtgcttagtcctacaggggttgatctttagcaatgacggaaagctacgaagtgcgtggctttcttatcgtcgggctgcaaacatcgcccagctcatcgggttccaccgtgctgaaccagctcccaatcagagtgtcgagtttcaacaccgggctacgttcatctggagacacatccttatcgttgacaggcatttttccctgatccttggggtacacggcgctatatccaatacggcaatagatctatatcaatccaacccaagagactcccatgatttacccgttcacaatgaatctgttctgaacccgcttgctcggatagcaggctcaatcattgagcgcaatcagaccttcaccgaagtcactccggccatgctgcagatgacacaaagcatcgatatgaaacttcaagcgttcgatccccctcctttggtgtcacccgacaatcttccgccaggcaagtgtaccgagcggtcttcttgttttctcgggcttcactatcgattatggtactaccagctcatggcttggttacacctgcctcttttactagcgtccggtactgacaactcctatgagtataatcgccagacctgtctccacgcctgccgcagcatcatcgcttgttatgtcaatatccgacgcaccactgaaaacggatttgactcgaagattcttgatttccaagccttcactacggcgatgacaattattgtcaatgccctcgggccatttggcccacaggacttaaccaaaggagattacttcgctctcgaccgggttgtggctgttctagaacaactatcgaatactgttcctccggacaagatcgcaactcgagcagtacacgttctgaaaatcatcaaggcaatagggatgggaaccgaacccccgcaactggacgaatcagaaggacaccaatacgagaatggacggcctactcgcatcaagctcgatattccctatttcggcacaatatacctcgaacgtcgttccatgagcgctcaatcatctagacatattgctattgctgttaaaccgccaccaactttgcccaataccgcgcctgggcaatactacccatcatcttcatggatggacacgatgccggaccccggttatccaaatggaaatgttgtggaaacaacccaatgggcggattctaacttgagctttgatccgcctaccgagttttgggctcttaactctgagttcacgtttcaggctccgtttttggctgattatgatgttaattgggattatttggatatgggattatgacgaacgcgtgtaagtcgagcggattgtgccgaatgcaagtcttgtattctttttcctcaatttggtgttttggcaggccacattttgtgttgttcctatagaaagaagtatccttagaatcattcgacgtgccttggacagtccagtttttattagatatgttggtctgccaggtcactttgattcgcccctcaatagtttatttatagtcaatagtttatctccgtgttggagaaagagcagtccggtgagctaatgtcggtgttcattactaggcgagtaccgttcacaagcgatataaagttcactcacacccgaggaatcatcttcattctactcttgatcggatgtcgggtaggaatcctttagaagatatgagaggaaagttattgagttcaaagaacgggcagttacctggagaccgacatagagaaatgtcattgaggttttgacagcccaaaacgacacccaggtataatagatgaaatgagggcgagctgttgctgatgaatttccacacggaaggagaggacgccgtttggcagccaaggaaataatgctagcctaacttattggaagaagagggaagcaagagtgttacgtatgaagatttgtgtctattcaacctctatgaccataattctaggcgcagtgactgaagccatgaagcctgagagacaaacggcgaaaggatactgtcaatacaaaggggccagtcgtcatcccatcgcaaagcacccacagctaagcaatattcctaatacctaggataccatccggatttttcccagtcaattatcacgaggtgtgaaccttcttggtcatgacttttctcgcggaggatgatatttttcctctgcaaatcaccgtgggtgaatgtcgctgtatggcctttaaaaataaaagggaagcatcttcgaagatattccgctctgtagagtgggcccctgttataggtatattttcgtaacattgcttcgttaaggtcttcttcggagtcgaatggaccattcactaatggatctggcttatatgtccaaaatatctcatctaaaagtcgtctttggtcgaaactgccaaagtactttagggatagaagctgacgcaagtcgtcaaagtaactccaaaggtcttttagtatttcttctttctccagtattgtaagttacggccatgctaaaagaggtgtttgaccgagaatacgctctatgacaataaaatttttgcctgtctctaggtctgaatagagggcgaagacacgtgggacagggatatttattttctcccgaacaaataacatattttctccttccatgagattgacacccagtccaaatttcacaataaaatgcgggcctactccgactatttttcgtcctccatattccatgggtatgccaggggcgttttcgatttcggtaccggtgggtcgcgggtaaggcaagtcagttgcatagaacggaatctcaaatgtcttcatcatcgctcaacatcaggcagtcggtagactgagggggagactgaagggtagggcgacgaatcgacaatgggtctttttggctcaccgctctaattaccgtcttagtaattatggttttaggacggttccatggatcaggtgtacgtagttaactatggctaatgtcatcgaattttcgaagtctattcacgcctatcttcctctagctcgacgcataactttacatcgtccaaaaagttcagggaaagaatgctaggtctacaggtatcataaagaagatgacaagtgactgatttaagaagcatcgggcgctatatgatcaataatagagtctaactcaagtctatgaaggaccgagtcggttatatatgctctggaacagagatcagtaagaaattccgttgaatctccgtggaaaatactcaatggacaaggtacgtacgaaaagcccctagcgatcatgtctgggaatatgtctatgacaactcccccgtctttgtggacctggtccatgcaggcattgatatcctcagtcgcagctgagtctaggaaggttaccttattcgttagtagggatcatgtgactatgagaaaaggagaagggtatttacaatatatttcgaacccatgttattcgagcatgtgtaatttgtatagatatttgagaggctgcttaggatacagctgtcgatgaccagcttagctatatatacctgatgcgccaagaacactgacgtcattgcatggttctaacctgaccgaggaactatatctcaacatccaggtggcaactaccattacgtatcctcctgaaccgggtcaatccgtttcgtggcaccgtgttacccacccttgaaccgtatattcaagcaattgcagcaagtaatatttgaatattgccttgttggtcgttgccagggtcattgcgacccggatacgccaattaggtggtttacatccgctctatgtaaggtggtgtgatattgcaatgtccaatgaataagacatcgcactctaccttgcggctttgaactctcgtgtatatatatctatgcgaaataggggaatgggacgccgggtaatcacaacggaaatcagtagtacttgttgtatacgggaggtaaacaaaggaaaaaaggacccacagaaatttggggtatagcaggtggcaggtggcaggtggccgagagatcttattctgaaagtttcgatccttgggatgacaacagctctgtgaagttacaccaagcccgcttgtaagagggatccttggtggagcactcatgcaaccaccggagagccttttggaccctttccaatgcctcatttctctcactggctcttggttggttctggatgagcaactgtgttgtgagcactacagtgctttgcgtgaggtagtggagagaacaccaccaaggtgagcaacccaagagccaggagatgttcggttcattgggtaggagatcaagcatttggcctgccgcattgaggcagaccattgccattggcgtgtcaagaccagtggagaagacgtcacaacgaagcgcgggttgtgaaatgacaagtttggtcgaataatattgaaaagccaaactcgtgcgttgacggacaaagggtcggtcgtctctaatttccgaaactataagtcccaggaaggcgcgcaaaccagttgtcagccgctctgttgagcgataacatggccatttccgtgtcattccgagattttcgtcccgcttcgggagaatacaagatctcgattgcttctctcatcacagctgccaagtcaatggaataaagaaagtacaatgagacgttagcctgaatctgcaggccaggtgatgcctggtgagacatgaacggtgaagaaggcgagtgggctaaagggtcgttcggttcagtcgagggatcaaaggagagtagagaagccatgaggcggcttctggattgaatgtccaaaataagcctcattacatgctcatcccggaagtcttcctccttgtagggcaccggcaaaggggttgtacagtgttcttgctgcattctgggcatacgtccagtcacgacgcagagcaggatgtccaacaggtataacgcccaccatagccgatatctggtttctttggacacgtgtgtgatgctggggctttcgctacgaaggtggattcccatcgcgaccgccgactggattgcaatcccacattttctccatgacctaacccagaatcagtagctatgtaaagactcgcggtgttcgacctacctgttggcctgcccgatggaaagcaagtaaagtgatattagcccctctacctgtgcctgctgcaggttgggattctccaatcggatactctcgctcgtgtgcaattgccaggcacgtgtaaagtacaccgcgtggatgttgtgatcttgagattggtctccggaaagctcgaaatgtcttgcagcgatcgcgaaaaccatattcaacaacgccatccacttgtttccaggatgtgctgtggactttgaatagaatgaccgacactggcttaaaaatatctctttgccaacgacggggaaggaggcgtgggcaacttggaagtacctgtccacaagttcatcggcgaccgcttttgagggatatgcgagagcatctagtttctttatcggcgagattcttgtatcatcgataaagaatgcacaggaagaaattgaaagaggggttgattcctcgaactgaccatccggattggaacttgtcggaccgatcaagcacctaagcctgtataaccatgccgatgccgaatgttctcctgtaaagccaatcgcttgcagggaaatgtctctattaaagtcctccaaggtgtgatccacgtagggaagcgttcgggccgacgaatctgactcatctggtactttggcaagggtcggcgatgacagggaaaggctagctatctgtaggttgttagataaaatcaagaaagattttggctgaccggaatatagactcgctttttcgagagcttggtcgatgactttgcccagctcagtgtcgaataatttgggataaagctcgcgaacgagagattcgtagtgttggagttggctcgttatcactgtaagttgtctaagtcctaggggtgaatattttgggcgatcacatctaggaggatcacagacctagcatttctctctcgtttcccgtcgacatagacacagagaacgttggtctcctgacatcggaggcaagaggggcgatgaccagaacacttgttcttctgtttgcgacagttgtggcatgcctgactaactcgaccagtattgcctacaagaggaaggtcgagtctaggaatggccactttagcgttcatcggctgctccccggcggctcgagggttgttccagggacgatatgcccccaagacgatcggctcccgtggtgtcacggcctctccactctcgagctcatttgtgtagttgaaagggtccttatcatttggggggactgttggaaggttttcagatcgcgaagatcgacgagatggccttccactcattgcaacttggcccgctgttcatggtcagcgcagagtcctaagcgagaatagaaaatctgcgacgaatccgagacgcacaaaccagcttgagggaagcaccgggagcaaaaacctcctttcgcagtgaaatatctgccggtgggattgatggccggagtatagctagcaacaagacttgttttgacaaaaggcatgacacctgtgattggcaggcccacgatcccggttggatattggtcggcgccattggtcggtgtaccgagatgccaacggcccactggtggctggattcaggacaggcatgatagatgattgggatcatctggtgttgaccacatatttcaggggttggctacaggtcaaggttgctgaactgcaaggtgctttttataagaagatgaatacgatcaatgagttcaccatgaggcatcttcaataaatgccagtcggtaatcatgacctcccgaggtcgagccccataggcaaaccttggaacgatgtatccaattacttccgaccaattagagacctcgatgtggactatctgccagggtgtcaaatagagatagacattgatctctatatatacagggacgaccctgagaataagcctccttttttaacattgcgggatactcccggcggctttatatgtctagccgtcccttttccttgaatcgaatattctgtcactggaaatggacctatcgttactccccatatgccaatggcttgctctacaataatatacaaccaaagtttcggctatccataactatctttaacttaatcacattggttgtctcgaaactaggactagcgcggatagctcttagcttgatcgactcttagctttgtagctatcagcaccctcatcacacaccctccatgtgtccgcacacttcattcgccagcctaattcctgcgtagtccgacatgcaggtataagcaggataaccgaatgggctgtaagttgtatggcggtataaaaatgggacatgcaagttattcatggtcggtgacatcatatgctatattacacaattcttctatagtaaagaacaatctagcagagaaagtcaattgaaggtcagattaaatgcattgactttgtattgagaatagacagctttgccaattcacctgaaaggtgtcaacgccaagaccgggattccgctgagatgggatacacagcaatctcctggccagccctatgcttacatagattggcctaaaatgtggggaagtcatagcgatctttgcgtgtgcaccttggcaatctagatgatacaggatcaatgataggttgaatggttgtgatatcgtcatagcctcatttccctgtcgatgacgtagctctggggaaagcttccttcatccgtcgatcttgaaatcccggacaattcttaagttctcttcgctcaacaattttattctcgggggaatcctgagaaggtgtactcgtcttccttctaccgcattgtacagtcaagccaaatcaaccctacaaatagccaaaccctgaacttcgattcgtttcctttttttccgccgctctccaagatggctacaggtcatcagcatgatgctcccaagagccgccgggtcggggagcattggagtggtgccaatcctattccaacaataagtcactttatgaaacatgtcgaagacgaaaaaaaggaacgcaatctcaggatagacgaagaacaccgggctaataaagaaaggattgcacatgaaaaagcgcaaggaacctatggagagcaatcagagcacgcagatcaaaaggatcaagccgagggaggtgctgtcgctcataagccacgcgaagtctcccaggccaggattcgtaccgtgacagacccaactacgggcaaggagatcggcgtggaagacctagatgagacatgcatggatactgtaaataatccaatggtatgtgggatcatatcgaaggaatcttgaacggagtctaatttattcgcagttgacggttccgaatgcgaatcttgggaagcccacggtgagttgtctgtgaatgtcagttcatgggacatatcactaatatgcatatcaggacatccaaacaagtgccgaccaagatcttgcagagtataaaaagatacaggacattaccgcacctcccgatcctatcgccgagggtacaacctccgatgttcccattcgaggagaaaagacgaacgttctgttccaccccacgcctactgtcacgtatcagcctatgtttgacgcactgcagaagcgtaccactggcatttgcattgggatacctgttgccataatcatactagggcggatgtgcgggggatccctttggggtcttgttcccttagccgcatgcattacgagtggaatatggttatggatgaaggaagtcattcgcagcggtcgcgcaatggagtgggagagtgagcatcttcgcggtcagatggtaggttctctattgtatcaccttgttgatggatagagatactgacagttcaaaaggctactgccaatctccttcctgaatctgtggagtggttgaacagtttcctcggtgtcgtgtgggggctcgttaacccggaaatgctgacacctgtggccgacacaatcgaagatatcatgcaagtctctgcacccaaggttgtagagaatgttcgcatcgcagcaattgaccagggcagcaacccactccggattctaagcatgcgggctctccccgatgatcatgtggaaggtttgaaggaaaacatccgcgaggaaaacaaaaagaataaggacccacaggaagctgctgctgccgaagaaggagggagttactacaacatggaagcctcctttgcctatcacgcaagcccaactggtcacagtgcgtcatcgaaagcacgcaacatgcacatgcaacttgtattctatctgggcattcgaggcctatttggtgtgccatttcccgtattcgtggagctgattgaacttgtcgggactgtccgcttgcgcttccaaatgatgcccgaaccaccattcatgaaagatgtgacgttcactttagttggaattccccacgttcgagcaggctgcatgccaatgttccgaacgggtgtgaatgttctgaacttaccgttgatctccaactttgtcaactccgccattagtaccgcttgtggcatgtttgcagcccccaagtccatgaccatggatctcggcatgatgttgacaggagatgacatccacaaggatactttggcactgggtgtgatgtggattcggattcaccgcgctgttggcttgagtaaacaggatgctcgcggtagcgagggtggcggcagcgacccatacatcaacctgtccttctcaaagtatggcaagcccatgtattgcacacgtgtgattacggatgacctcaatccgatttgggaagagactgccgcccttcttgtgacgccggaattgatcaaggccaatgaaaacctgagcatcgagctctgggactctgaccgcaacaccgcggatgatattgtcggcaaggtcgagctacctatccgggagatgcttcagcatcccagtcagatgtatccccaggtctcgaagctccagggtatggatcagggcagtgaaatgcccggtgagctgcattgggaagttggctacttcgggaaaccaaagcttcgccctgagctgcgtactgatggccagaagaaagaccttcctgaaaacctcagaggcgatccgactttcgaagacgaaaagggggctatcaaaaacgaagaggaggatgccattatgcatacaccacccgatccaatctggcctagcggtattgtgcacattgttgtgcaccagattgtcaaccttcagcttgccaatatcaagggcagtgatgggaaccgcaagggcaaagagtatgagccagcgaagccatatggtgagaacacagaggaggaaggtgaagatctcccaacgagttactgcatggttttgttgaacgaccaactggtacgtatttgtagacatactagtccactccaaattccagatactaacagtatatcagatctatcgcactcgtgcgaaggctgtgagctccaagcccatcttcaacgcaggaactgagcgatttgtccgcgactggcgctcagctgctgtgaccatcaccgtccgtgaccaacgctatcgcgagcatgaccctatccttggcgtggttcctctgaagctatctgatatccttcaaaccagctcacaagtaacccgctggtatcctctcgacggtggtattgggtttggacgtatccgcctttctcttttgttccgccatgtggagaccaagctgccaccttgcatgcttggctgggatgtcggcacctttgaatttgctggacagaacatcatcgcgaaggactttggtcgacactctaagatcaagctgcgcaccgggggcagcgttggcaagatcacccggcacaagtgccacatggaaggcaatgacgcgatattcgatatctccgatgacgctttccgcgactcaattcgcatgcctgtaaagtaccgataccgctccccgatagtattcgagttccacaacccgggcaagcgaggcgcagccgcatacggtattctgtggctccaacatattgtcgacaacgaggaaacagacattgacattcccatctggacaacaaagatgggcgctcgcttgacacagaattacgtcacggaggagaactggaaggccaagcaggtacctggactcgaagacttgacagaggtgggacgtctgcaattccgatgcaagttctcaccgggcattgacgaatcacacgagctcttcgtgattgacaacgactcccgtgagaccttcgagacgtgggaagcgtgcgtgtcccagggtgtccgtaccagcacggtggaggtcgaagttcctcctgaagtgcaggaattgcacgagcagtctctgatcgaaggacgggacatcttgaagcaagcctcgccctctgagcgtcagcggtggattgaccacgacggccaagactggagtggagcgttcggtcaagacccgcgggcgtacactgattccctcggacgcaaaatcgctgagcctggccgggaccaaccgccccatgacccgtacacccctccgcctctcaaggatccatcttctcatcgatccagttctcaatatggagagcaccacaacgaggacacctcggagtcaaatgacgagctcgagcccttgtcgagaggaccctcgaccatcagtggcagtggacctgggacgtctgcgtcacacagcaatatgagtactcgccagatcaacaaggcgaataaacacagcgagcagcgacagcagcgtggtatgatgcagtggcggcctgcgcgcaatgctgcttttgctaaagatgaggccaagtatgcgttccggaagatgaagaagaagatcggtgctggtggtctcactggtcgcgagccagatgtcgagacggagacttgacgatgtatgatgttttatgtttcggcgttttgtatgtcctttgcatttgcatataaaatgtgaatatagatttattatttactgtttaacacccacaagttaactattgaacgcttatgactaccattcactaccatgtagatgaacctaagaatggcggtgatgccttataaaagtttaattccagatttggtcaagaattgaattcgtgaactctgctttctgtcctcgttgttttattttgtgccttatgagattgggaaaagtatacatcgaaaggatataatccatagaagatagaatgatagaaaaccatagccagtgaagaagaaaagaggcgcagatgcgccaaaagaaaccggacaaacccaaacagcgcctctatacaacatgattcgtgagaaattatatgcatcgccattatcatgcaggggaaataaaaggagacatcagacaaaaaaagacatcaggcataaaaccatgaacgtcacataattaacaatcgggcgcaaagtcggtggatactcggagagactctgggccggaggtaaccttagccgcgttcaataatgagacattctcggggccattgatctcggccctatcgacaggcccgagagtccatttccattccctccgacgcttggcccggccctgcctgggcgtgcgcggcgtcgaggagccatccgcctcgaagccatcaagcaaagcgacggctcgcacctggcgctccgcacgcatggtgcggcgctttttccgctccgtcttggagagcgaagacccgcgcacgccttcatcggcactggtctcatcgccggaggcactccccgataaggacgggctgttatcggagtcctctttttcgccttcgaggtgcgggaagggggcggggcctgtctcgggtggggttttggttctggcgagtgcctcggttcccactgcctcgtctgactcggtcacgagatccaggtgttgcgcggtgtagcattctgtccggatctcctcctccagtgggtaccggtagctgacttgtttctttgctgggaagaagacgcgacgtgagccgccgccgttgggcccatttccgcttgctgagatggagccnnnnnnnnnnnnnnnnnnnnnnnnnnnnnnnnnnnnnnnnnnnnnnnnnnnnnnnnnnnnnnnnnnnnnnnnnnnnnnnnnnnnnnnnnnnnnnnnnnnnnnnnnnnnnnnnngggcggagggttctagtggggagttgcgtaaaatgctgcgcacgccgatggggagttgatatgggcggtggttgaagatattattgttcgggtgtaggatgtagggagaggccggtttgttgtagcgcgtggatttggagggggagggtgcggaagatggggatgcaacttcgtaggcattcttgaaggtgtttcgaatagtgggggatgaagttggtgctgttgcgaaggaaaatgataggccggtcgttgaagtgccgaatgtgcgagggagcgcggtggtttggagggtgagttttggtcgggaggtcattgtgctcgtcgcttcagacagacacgacatggtaaaagtagagaagaatcaaatgtgtgtcatctcagcccaagaagaaagaaaaaaagaagaggaaagatgtttagcggggttgaactaagaatagaggaggttggcgcttgggatgtgatgaaagatgcatgtcacttgcacattccacgacttaaaaagatttaagattaacgtcaaagtgctttattcagagtatttaaaccatctccatggagaattaccccatatatactccgaagtactccgttcagcgcaaagcagagatttccatagcaattccagactccagtggatgcgtaactatcgacgccaccatccacactaatttcggtttttctattttggtagtatagcagatgttgttgtttatgtcaagagtatcttatagagtattttaaggtatttcctgaataaaaacaggatcaggagcaggatcagagagaaaacgcattcgtctataaaaagaacagggcccgtgggtctccgatctacctatacgggtatatgcctggtggcaaagacctaaatatggtgggtttaggtggaaatgccattttgcatgtcttatcattctttgtctgcctctactttgcctatacagactacattatacctaatataaagtggcactgttgtatactacacgtgacgctggctgcaagcgtcgaagaggtattcgagatatgattggtgggaaatcgatccaactgcaccggattgactagttctatcttgttgctgggggcagggtaacatcagctccacccaatggcgtcgatgacttctacctggcattttccactttcgtgcgatgccggaggaaagcgcaaggactggtcgactaggatgaggtagcacgggatctcattgagcatagatatctaaaatgaagaaaagcagcttagaaccaataaaatggagtagaataatataactgactagtaactacttcgtgcatgaactaccaggcaccaaggccaataaagataagccaccgacgccacaccagccacaaataggccccaatcgtgaagttgcctgcggttcctgttttcagcgttcgatcgttgccaggcacccgcaaatcaaggtcccatggacacgtcgacatcagctcagagttcatggctgcactagtgcggaacgacgatcgcatcatcctccacttggtagctctctccactcttactgccactggccacgctttgactaacccatatccaggattatgactgtttctatgcctcggtcttcgaggtggaacaacctgcattgagatctcttcctttggcagttcagcaaaagcacattgtggtaacctgcaactacgaagcccgacgccggggtctgcacaagttgcagctcatcaaagatgccaagcgcatctgtcccgatgtggtaatagttctcggtgaagacttgaccaagttccgaaatgcttccaaggagctttatttgctggttcgctcctttgtctggggcggccgtgtcgaaaagctaggctttgacgagctttttctcgatgttacggaaatgattgactacaacgctggcgtgttaaatcgaaatgatttaacgaattcgtatttccatcttgatcggaatgacccgaccgttggtttttcctacgatgccactcgcttccagggatcgacctttcccgcaacggaggcagccgctcaaaacgattcgtcttcgttggaaatgaggttgctcgttgcctctcatttacagggtcatatacggagtaagatagagcatcaaataggcttcacggctacgggcggaatctcaacctccaaattgctagccaagttggtcggtaatgtccacaagcccaatggccaaacgactcttctgccgccatatacggcgacggaaaataatactagcaacgtgttccagttcctggatgatcacgagattcggaagattcccggaattggttctcgcatcgccgagaaactgaaatcccatatcatagggaaagagagcgtcggcgagaagatcacagtcaaggatgtccgccagttctctggtatgagcccatctttgctggagagaatcctcggcgggccaggctctgtgaaagggatcgggatgcgcatgtggaacattctccacggagtagatagttccgaggtgctcgagggtcgcgatgtgcctacgcagatcagcatcgaggattcttacgggcggttagatacgcttgagagtgtccgacgagagctcgtagtgttgtcccggagtctgatccgccgcgtaagaaccgatttgcttgatatgagtgatgacactgctcctcaagggagatggcgtgctcatcctcgcacgctacggttatcaacccgaccaagacttccggcagacttaggtaccaggcgtgcatacagttccaatcgcatctctcgctcagcacccctgccaccctttatcttcaatttggatgagaatatcgatgcattagccgtacggctggtccgggaaagtgtgttccctatgtttcgcaagttacatcccgaaaaggctggctggaatctcagtttgttgaacgttgcggttaccaatatggtggagactgcgggggaccagaagcgaagcagtggccgtgatattgggaagatgtttcaacagcaggagacagtactcaaggattggactgtgcaggaacccgagccctcgtttgctaatccgcagttacccgattcccctgagatagagtcacagtcggacgatggctgggatgacgatgaaccctggagtgtggattgccctatatgtggggtgtcaatcccacactttgcccagttggcacatcagatatatcatggggatcatgaatcacagccctctattattcggcagccttaaatgccaattaatgccaagtgtcagaaattcttcaataggcttccaagcgtcttggcttaagccacttacgcgttataccagtacatactatgagaaagactattacatagttcccttggtttccttagttacttactgaagagtctcgacgttaacgtgttgggatatatatcgatgatggtatactccgcacacttcaatatcacccatggatgctataacctgccaagcaagcaagagacaatatgattggatgaaataaaaataactctctctctccacagaaccacaggaaccagttatcaatgcgtgcaatatctggaagattaaaatggcacttcgaaattgtttcagtccactttgccaagccaactggatcgaggattcctaagcccttggcagtgagccctgtacagccccggcattatctgatccctctgcctttcctttcttcactttctggtttcttgaacttctagtccttcgttgattttggtttctctcttgaaacattccttttgaacccctaaacccctggtggacccttaaaatttcccttgccactcagggtctcggaaactctattgaaaagaccggggaaggaccctgaattctggatcttgcgatgaggttttctaccattctgcccttgatcggtgcattgtcatcgctctttcaacaaacacaaggtaaatccccacttgcagcccagaccgtcgttgcccaggcctccgttgctcagcccgttgctcagcccgttgcctagctccgttgcctagccgctgacaatccccagcacgatcacaggcctcaaacgccattcgccgagtgacgcccgtcgacaatgccatcattcgtactccttcacatcaaatagatcacctgtcacattttgatatcacgttcgccctacaccaagacggcaagcgcataaagctagaactcgagcccaataatgatatcttggccgacgacgcttatgtgcaatacgtccgtaacgacggcacaataacacattctgagccgatcaagcgagacgagcacaaggttttccgcgggcgcgccttggtaggatccggaaaggggagatggacgcccgtaggctgggcaagaatcaccgtccaaagggatggcctcgagcctttatttgaaggcgcttttagtgtcaacgacgacaagcaccacattgagctgcaatcgacctacctcgacaaaaagcgcccgatggatgccgacgtcgaacccagagatgggccatcgatgatcgtctaccgtgactccgacatgtttcgctatacgcactccgagctcaagcggtcgctgcccgtatctgaaggctgcggcgctaataaccttggatacaatgctgatctgtccaatacgattttcggggatatggacagccaatggggtgtggtttcgttgaactcgatgttcggattaagcaagcgacagtccgatgttggtggtgtctcgggaaacactggcggtgtgaatctgaaatcgaccatcggtgattccagtggatgtcccaaaacgaagaaagtggccctgatcggagttgctacggattgtgaattcaccgaatcctttatggctacaaactccacacctgaacaagcggctagggactgggttatcaacgtggtgaacacggcttcaaatctctatgaagaatctttcaatgtgtccattggtttgcgcaaccttacaatcgccgagacaggctgctctagctcgggctccgctgctacgccatggaacgtggattgcaacggcggaaatgtcacctggcgcctgaatgaattctccaagtggcgcgcaactcattcagatgacaatgcctactggactctgatgactaactgcccaacgggctccgaggttggggtttcatggatgggtcgtctatgctcgtccgaactggttacctctggagcgaactccgtggccggtgccaacgtcgtagtgcgcaattccggttcttcctggcaggtgtttgcccacgaaaccggtcacacctttggagcagtgcacgattgcgacgagagcacctgcgcggataacctggaagcctcgtctcaatgctgcccgctgagttcgtcaacctgcaatgccaatgcgcaatacatcatgaacccctatgctgagagcaccatcaccaagttttcggaatgtaccatcggtaacatctgctctgccattggcaaaaatagcatcaagtcctcttgtctatccgacaaccgcggcgtcgtgaccatcagcggcagccaatgcggcaacggcatcgtcgaaggcgacgaggagtgtgactgcggcgacgaagaaagctgcagcgacaactcctgctgtgaccccaagacctgcaaatttaaaggcagcgccgtgtgcgatgactccaacgacagctgctgcgatcaatgccagttcgcctccgccgacaccgtctgccgcgccagcaccggagaatgcgacatcgccgagacctgcagcggaacctcgagctcttgtcccgccaacaaatacaaagacgacggtgccagctgcggcgccaaggaccagggactcagctgcgccagcggccaatgcaccagccgcgactaccagtgccgcacagtaacaggcgcggtactgaacaccaacgacacctgggcctgcgataacacaggcagtccctcctgcagtctcgtgtgcggcgcaccctcatcccaacaatcaatgggtgccacaagttgcctcatcatgaaccagaactatctggacggtacaccctgcgactccggcggccgctgcagcgccggccagtgcaagggctcctcggccctgggctggatccggcagcacgagaagctggttatcggcatctgtgtcggtgtcggcacgttcctcctgctcgctatcttcttctgtatctatagtcgttgcaagcgcagtgcacagctgcgtaaggcccgcaaggctatcccccctggcacttatcgccgctataatgggccccagcctactgcccgcccgcctatggaccagtggcatggataccggaatgccggctatcagaatatgcctccccctggttattccgggtatcagaatgtccctccgcctggtgtcccgtatcaaaacggcgggtatcagaatatgcctccccctggtcccccgccacgatacgcatgatcacaccactctgcttctagttatattacagtttatgggttttattgaaccttgtcttgtttgcattcgggcctctgggatttgatctggaggatttgggtatcggcgtcatcgcggatggttgtctaggtggttattatcagtcctttcgcatggataatatcatctgcgatctggggttttgggctttcccttcttgtgggtacttcttgaatttggatgcatttttcgtgaatagattatgtcgaagccctttgggctatgaatgataccgaattttcaccttgcgagagagcatgtagatgtagaggaataaatatccatttgaagtgcgattttgacccagaataaacacagaggcactgactccaaaaacaagcacatgagtaaaacgacaagagaacaggaaaagtacttagatcccaacaccaaggaaaaaacccatgtacaacaaacaaagtcaagtcatgtcaagtctcagtctccgagagcaaccgaacccatctaacaggattcaaccccaaacaagaccttagacatccaactcattgccaacaaatcccaacaaaagcctcccgagtaacaccaccaacgccctcaagatcaaactcctcaatcatagctctaagctcctcctcctcaagcccagtctcccccaactccctcgcaacacgcctcaaatcctcaaggtcaatgaaccccttgccgccctcatcgaacagctcgaacgcgcgcaggatctcgtcgcgcgggtcccgctcgaggatcttcaacgccgtgacggcctggaacgacgagagcggcatgagcagattggacggatgttgcgggttcgagacgggccctttgttggaggcgaggggttgggattgggcgtgttggttgccggcggcgccttgttgttgctggacttggggacggggtacgccgtacgttgttagcagggagatgagctcttgtttgccgagtgtgaagcctagagcgcggaaggcgacgcggagctcgtggtagtcgaggtggcgatcgcggtcgaggtcgaagagggtgaacttgaggggtttgggttagctgggggttttggatggggtttggttgttgtggtttggtttcttttcttttcactcttggagggaggtgagagggaggagggaggggttgcaggatattgcagtaatttaggagaacagtagtgtcatagatgggtggattgggtatcccttacagcttcgttgatctcttccctctgctcttccgtgagtctgttcagcggattcgcgtcctgcgctgggccatgggatacggcgtttgtggcgggcgcgggcgcggactgttgcatctgcttttggccatctggaaattcgccttggttggtatttcccagaccgcgatgccgtgagaatgaggaggcgctgaagggcatcgcgttcgtgttgacggagcgttctgggagtttcgtgccggcgtaggagcgcgacgcgaagggttggccagaggccatggtggatggcgtgttcagatttaattagatggctggatcaacagttcttcagcattgatttgagtgaggggctcgcagcccatgagaatgcgtggagagatgaggtgtttggcggtgggaggattctggagacgcgccagacgcgggcggaatgacaacgcgctgttttgcttctgttacagatgtagtggtcaatgaaaatattattgtttcttggaaattctgggttcaatttattattgctagaaggatgagcgagtgagcgaacttctagacacagcacaacctggtgctaatcacaatatcccaagctgccaacccataaaaactctttaaccaccacctaacgtggttcctcaaacttcctcaaacgagtgctgtatgttcctcccaaggacaacttgttaagaaaaacaatagtggtgagcgaatgttgctgttgccggaggtttcaacaattgtacagagatttttggaaattgccataaagtggcattgtatcgggtggcattgtatcaacaaaggcggcacccattggatcgaatccattgtcgtattcactgttgaggatgtccatcagaccattcggatccaggcttccaacttgatctggataaattatgctatcaaaggaattctgttcctgggcaatcaccgtgtcgtgcgaagtcgctgataactgcaagagcccgtcgtgctgctcatcaggattcgcaaagcgaggtcgagggaaatgatcagctaggaaggcttgcatttcgcaggctggcggcgaaaagggaccgtcaggccggcccaaaacagacgacatttcctcggggtctcccagccagaaggccatatccaggcttggagacgacgggagactgggaacttcgtcctcaagaatcgttctgatggaggatttcacagtagccccgtgtctgggggacacattgcgcaggatatcttcgagtttttcccgaacaccactcagataaaggcgaaaggaaccgaatattctcgcgacgattgggctgtattgaagatcttgcaagccgcacgtaactcggtagtataatgctgcagcgacccaagcgggctcgatctcattttctttccctggtcggtttttcttgttgctgttctgcttgtcctttccgcacagagccacgtacaaaccagggcaaaagtcctgagacatctctgcgagcttccgaaacgagagaatcaaaagataaaacgagacgagtcgcccggtggtaacatcaaaccaggacgaacggattcgagcttgcaccaagccttgaatggccataaacagatttgccattctgagcgcagtccagacgagcgggttgtgtttgtattgatcttcaaatttgaccagatccacgaggggaagggcactgataagcccagtaagaaaatcatcgacagggcagtctgttgtactagatagtgcgatactggacctcgtgactgtccaatgccatgcagtgcagtttccgccatatgtttcgcggatattaacaaccgcgttgaatgcattcatgcgtttgaaaacctcgtcacccatgcgttgcaaagtatctttcgcctctggggacgggaagctaaagatcgtaagagagccccccgcaggtggcccaagcagacatagatctccccaacttcgaaagcagattcgattacccttagaagagcatggaggacatggtgtagttgttccacactttttcttggcccggtagcacgccatacatgagccgccagctttcctgagtgcggcggtatcttctctctgttgcagaagttcggcccggttacgcggaatcttttcgcggatcttatcagacttctcagggttcgctggatcccacgggacgaagccatcgggatatgcttcctcgagatgaggagatagcggacgtcctagcgcagataatggttgtgttctaccgacaccatgttcactccgagcacgctcatgttcagtcgagacgcgtggcgaggtatcattggcattggaaggccatgttgagggtcgaggattcgagcttgtaggagatacggagctttgtacttggtcttgaatcgtgggaggagtcattattgaatcaaaacaatctgggccgccaggcatatccagcccctgaggttggtcttcaatcatgggaggcgtcattattgaatcgaaagaaactggaccaccaagcacatctggcccctggggttggctgctagacatctggagttgaatgtttaccggactattgtcgactttgttgggcattttgagtatgtctggatctatggactgggtctcatatgccatggccgtcgacgacagttgccatgtctgtgacattgtatgctcgatattgggatcgggaaagtaaagtgtggctgatgcgagtggagacatggcagactgaaaggtcggtatcagtatcaataatccacgagatgtgcaagcttagaatgaaaaccacagggacataggaggacgcggtgggagatggatcgaactcacaggatagatggaatccggtgtacgtggtgtacacggcgcatatttacgcccgccatttggatgtggagacaatggagacggctgatgccgtgtagcggcttgagccatcacggtttcaagggtgaacgataggaaaggtaatgatggacaccctgaaaagtcctcgagcaaagagtgagagcgaaaggacgggcttagggcagagcctaacagcaaactgatgcttgtaccaacaagttgtcaatcctttgcgaagggagagaatgagtgacgtgaagtaaagatggaacttgagatgcacttgggggcttcaaaaatactcaaaacggactagtaccgttaggaaggccaaacctttacccgaaccttagcagaaccttgaacatcatagcgagacacaagggcatcacttgaggtgaagcaggcacgactaggcccatgaggccgattccaaatccggtatagcccatcgctaggtataaggtttacatggtttccagggtttaggggcggaaggagtatgagtactgccatgtgaataggcctagatgtgatgtatgggaagaaagatgtgagcaaacaatggagacaatcaatctctttgatatgaggtactgtccaaatcactgtctctccgcgtacctaaatccaagtcctctaggaaggtacgaccgaggagttgctcgggcaggtaatcctgttgaaccttgccgtcgacatagttcggattgtacttatactccgcaccatagcctagctccttcatcagcttcgttggcgcattccttaaatgaacaggaatgggcaagcccgcgattcctggctcgttcaaggcggcaaagacgttattcaagccacggtacgcgcgagtactctttttcgatagcgccatcgccacagtagcgtgtgccagattgattcgggcctctggaagtccgattttttcaacagccgaatgtgtggatatagcaagtgatagcatagtgttgtccgccaggccaatgtcttcggaagcgacaacaatcagtcgtcgagaaatatacagggggtcttcaccggactgaatcatgcgagcaaggtagtagagggctgcatctgggttgctccctcgaatggacttgtgaaaagcggatatcgtatcataatgctgatctcccgcacggtcatacaccagcgtcttggtcaaagatcgtttcaggtcctctttatccattccaggtctttttgacagatccatggcaagctccaacaaattcagcgaagtgcgagcatctccatcggaaaatttggcgagatactgaaccagctcttcgtccaccagttcggagggcgaataattcgggccttcaactcggagagcacggtgaaggattgaagtgatatcctcgtcagtgagcttcgcaagagtaaatgttcggcaacgtgagagcagcgcattttgaaccttgaacgatgggttttccgttgtggcaccgatcagtgtgacctggccgctctctactgggcccaagaacacatcctgttgtgactttgaaaaccggtggatctcgtcgcagaagataattgtttttctcccagtgagtcccagctcactacgagcttcggcaaatatcttcttgcactctgctacgccgctgctggtactgtttatttccacgaatctgctgcccaccagcgacgagatgactcgagcgattgttgttttccctgttcccgcgctaccccatagtatcatactcggtactcggtcctgttcgatgagtccgcgtaggatgccgttcggtccgacaagttcttggccgcagacctcatccagggttttaggtcgcatgcgttccgctagaggtgctgctttgtggaaggcgttgatcctgggacgctttgcctgcggctctttggattcaccatttggttgcttaagcacatctcgctcccgtgtagattctgcttcctcggtaaatgatcgcttgccggtgagagcacgtggggttgttgtgggacgcgacggggacaccttcggaatattcgactgggcagaagctttgcgcgcggacggaggttgaaacatgcttgggactggtcccttctgagaggatgccggctctcctggagaagacgacggttcttcgatgaagctctggcagcctgagtcgatgtggttattgatcttcaattgggagacagattgatcgcatattgggcaggaaaccatgatgaccggagaatgatatggtcattcactagattccaaggttactcaaagacttcaaggtgagataaacgtcgaggcgataacatccacccgcgggtgcgacgcgttcaacgcgttaattactaagtaagaggccttggtgcctgaaaatggggcaaatgacagatctacctaactgtatgaaaacatgacatgtagaatatgtagatactacatacatctactcaacaagtacatgcaagtactgtataatctccgaatgctccgaatataaaatcaagtcccgagggccgtcagagccgaatgcggagcacgccatggtggggaaatccgacatctctatctattgtcctctctcctcttattcccttcaatatcgctcatgatttcccgctcctttcggcacatccttgctcaatcacagaattgcaggtctagaacccttctctctgccctttcgacattaccccgccctggttacagcacaagagcgatgtcggctacagcttcgcgacccgatccatttcgccccgcccagcgggtggcaggacagcgccaggatgtttggtatgccgtttcggaaaagaagttgggaaagacatactaaactgagatccaaggtcaatcgtcaacgaagccgccgcagcttcgccagttcagccgattgtgaacatgggccagggattcttgtgagtcacaccatttcgaggacccccaattaccccaagggatgggaattgacgggaaatatttgtgcgcagtggctataaccctcccaagttcgctcttgacgctgcgaaggctgcgctagaccgagtggaatgcaatcaatattctccgacgaaggtagagaacgccaacgaatctgcgcatggttacacaggtgctcatacattatagggtcgcccccgcctcagacaggctattgcggatgcttactcgcccttctttggcaagaagctgaaccccgagaccgaggtcacgatcacaaccggcgcaaatgaaggtgagagatcggcatagtttatctataaatgcatacttggcactgacaagcgacgaaataaaggcatgctcagtgccttcatgggcttcatcgaggatggtgatgaagtcattatcttcgagcccttttttgatcagtaaggagctccaacaccgcgagaggattgagcggatactaatttactcggaatagatatattagcaacattgagatgcccggcggtaccatccgctatgttcccctccacccgcccaaggatggtgccaccaagacctctcctgcatcggagtggactatcgactttgaggagctcgaaagggccatgaaccccaagacaaagatgattgtaagcatgcgataccaagattctcatgaatatccaagctaattatagcaggtcctgaactctccgtaagcagacctgatttacagagacgaataaggtctcaactaactttgtattcatagacacaaccccgtcggcaaggtcttctcgcgcgaggagcttgagtgcattggtgaactgtgtgtgaagtacaaccttatcatattgtctgatgaagtctacgaccgcctcttctacgttccctacactagaatcgctaccctgtccccagagttgttcgagcgcactttgacagtgtgctccgccggaaaggctttctacgccactggttggcgtgttgggtaccttatcggccccgagcacctgatcaagtacgtgtccggtgcgcacacccgtatctgttacagcagtgtgtctcctctgcaggaagctgctgctgttgcttttgagcaggcagagaaagagggcttctgggacgagagccgaacagatatgaagggcaaaattgagcggttctgcgaggtctttgatgagcttggtatcccggtatgtgattattcacccctatgtgccaagtctactctcccatatattgattttgctgacatcaatctctccagtactctgatcccgagggtggatactttgtgcttgccaacctggcctctgtaaagctcccggccgactatccgttcccgccgcatgttgctagccggcctcgtgatttcaagctctgctggttcctcatccatgaggttggcgtggctgctatccctcccactgaattctacacggatgccaacgccctcattgctgaggattatctccgctttgcggtgtgcaagaacgatgatgttcttgagactgccaaggagcgcttgaggggactgaagaagtatatcacccagtaaacaaagacctataggcctttcatatgtgagaagtgacgagatatgcatagaagtgttatgatgccaatagaaaatcggatataaaattgcaaaatatgtgcacaaaagccaattctttcccacagggcaggagtggtctgtctaattgagtcttttcctacttggttaattgtaaaatcaacattcggccaatgatgccaagttcattttcgatcacgtagcagccatcgtcgttggtaacatccaaactcagctatatatatatatctttccttaatgatcaatctactagtacatccatatttactcatgtacagctaatcctacgtaacttacggcacctgagaacaaagaaccaggcacagtagggcaaaggcacaagcacacgacggtctttgtttcaatctagaaacaacgcagggggcgatcaactccccctctatccccacgccactaccaagagcgtaatacaaaaatgggcatcctgaacctggggggcatccaccgactgaactgataatatctctctccaaaccagctaccccaggtccaggaccccggtataaacaattagggctagagaggggacggctccctaccctgaccccggcatctccagctccatggggcccgctcccaccccgtcccaaccgataccacggtggaatgtccgccggtcctcggacaggacccccgggaatcctccgccacgcgtgcgagccaccacgtcgctcaccgatggatgggtggctcggtgcgccctcagaatccaatacttggattcgagggattcgcacactttccggaagcccaaacccatgtcgtggttaccgagcaacgttgggcgacgctcgctcgcgcagatcagattcccgcagtggcgtcggtcggcaccgatccactccgtctcacaagcatgccgcaaaccaagacggctctgatcgatggcgccacccatctcgagtcccatctggtaacgcagcatgctgtccatgtccttgtcactggcccacatattgtgagcccgcatccagtcccgtacaagccggtaaagaaagtccactagggctggatgttcaatcgccgctggaagagaaaaagagttagcatatgatctgaaagttaggcaatggtgagggctgtatgatatcaaaatgcaaggaaacagagagtggcgtgaagctgaaggtgactcagagtgatataaaacttaccgaagagacaaattgcaaggcaccggcggaaccggtccttctcttcggcgtcctcgaaccgcacaatatgtgcgattcgaggtgaacatcgcagctgcagatgactggctggatcgtcctcaaccttcaccaggtcgtcccactccgcgaacacgaagtagtcacctcggtcgcgggcagaactgaaccacagcgcctgacgatggcgctcaggtttgtcccactggtgaaggttgggaagcatcggtggacccacgagaaggtcgtgagagatcgaactggccaagcattgttccaggaccgggagctgcgtacaaactacccagtgtctcttggcatcctcccacaggtggtccttgccgcagtagcggaccaaggaaaacggtccgcacttagggcaaacaacggagaccccaacccccagacaacagagggcttcgcagaatggctcatggcaagtaacgccgagcgtgcgcaagtctaacagtaatccagggggtggggccccggtgttgccgaactgcttgactgtgggagtcagttcattatcctcagacaactcgggtggagacggagaatgaccttccattccattggtctgagaagaagcaggagagatggggagctcgacgtccgcatcgcgagcttgctgacgcttcatcaattcccgaagcttccgtttaccttgcttcttctttttgtagacaatcctcttgccgggtcggctagactcagctgaagtttggtcatatggctggatggtgccatctgaactgggatcatctatcccaaactcagccgagtccgtggtagacaaggcagacgaggcacggggggtcaatggagggtcggtcgtttgggacgaggatgtcatttcctggcccctgtagagccctatggttctcggttagcttgtcttcaagtaaaaacatgtataaaaagtgattgcatacctagactggccacactaaaagactcacttcgatgcaagactggctcctgcgcctcgtggtcgccatggtactcttcagggtctatataatagtcaacaggtgtatcaacatcgatataaatggtaaagagcttaccagaaaaccataccttgtccctgttgttcgagacagggcaccgaagcccagcctcacctccctgtggagtcaagaatagctcatctgaagtcgctgctggctcgttctcttccactttcaccgactcttcgccatcatcctcatctattctccacaaggcgctcgtaggtgtgcagaaagatgacattgtggataaggtgaggtaagtacgaggggagaggtgggttcgagctgtctcgaatgatggagacaatggggcagtcaagtcattgggcgtagtagggaacgcgggatcgcttattgtttgtgtttgttggccagcaactgccgcaagttgctgcttaatcgggacttcctgtagagcgatgccatgcactcccggaagtaggtcgccacgctggtcgctgccgtgctggtcgctaccacgttgctctgtaatacggtctgtgatgcggcctacattcttctttcctacatccctctttcctgtgttggagctagacaaaccaggcgtgcactttccctttccctttcccttacacttgcccttgtacctcttgttgctcttttgagtatcaatcgtgagtgcagagaccttcttggtcaactctttctgggtcgcctcatgctgggctgactcttgttcagtcaactcatactggttcaactcatggctcaacttatgctgggtcgcttcttcctgggttgcctcttcataaggggcctgtttctgggtcgacttttgacttcccattgtctctatcgtatgttctcgccctagcaatgactgttctggatgtgacataactgacgcatctggcttttcttcctcagagttctcttcttcgactgtggaatgctcggggaccctctttggggatttctttgatgccttattccctttgatcttcttctgaatggagaaacgggaagtttcatcgacaagcaacttgtcaaacagtttgttgtctatgtcttttgtccttgacatcagccattgaatgcgcagccaaatttggaccggatatgccatccatttgccgtaagtgttctgtgatttgttagttaaacccgaagaatatcggtgaaggttttatactgacagggtctttcttagagatcttttgataaaacttgtcacgcccatcaacggtgacgatcatctgctctacaggtcttctgatcctaccactcacgaacttgaacttcatggtgggcaatttctctttcgctttcatccagcttacttggcagctggatgtctcccatggagttgtccatttgatatggtaactatgtctttccatgttctttgactctcgaagagccggtgcaggaccagtctcgatattgctcatggcaatccttttggggcactcgaatagtgcctcgatcgagcccataatccccatcatgccgtctgggtaattgatggggatcctgaagtcaacgcggatgatctcggagttttcaatgccggcctcaaggtcgcacttgaggttaccattggggttattctctatggcaaatgtcggggtaggggtcctccagttgtgaatcttcagtctcaactgcccattccccaaagtgatcccggcctgtctatccatccaattctctgacatgggctcactttgggaaatgggcatgtcgaggtgttcaaaaggctctctttagcctcgagtggttctcgaggttgttaaggaaggtacctcgctgcaggatacgtcagtcaaatgcaaggtgggtaatccgtctttgcaagatcggtcttcgagatcgtgaggagatgtgatgacgcctccaatatagattacttaccaagatgtgtccttgggatactggaaagctgtaagtctgatgtcacaggaaatattgtggaagctatcctgaatcatcagccaaggtccttgggcgttggtgaagctccaacgcgtgaaactgcgcgagaaattactttgtgagttttcaaagcgttgatagcatgcactatgaggtgaaatgagcttttgttctctgatacaatggtgttgatccctcaaagagatggggagggatatgcacgaaccaaagctattgagtttgcggggtgggaagggttgaagggaagaatctcgggaagggaacaggatggagagaaagaaagacaccaaaaaaggataggctctgaaatttgacaaagcaaaaaatggtccaccttcgagcttcgacaacaatcaacaatggatacaaataagctgtgcacgtgctactgccactgagccttcgaccggtaattgacactgaccaggcgattgggacagaaatgaggacacacacatgtaactcatcccacacagttcaaggcatttgagcataagttcgaagctcttcgatggtgtcttcaaaaggctccgattgctacttatgctgtgggttcagagcctcaaattgaatctgctccagaacagaaaattatgtcgatttcctacccaaaagaatcaatacgcaatacgaagtattgtattgagcaaacatcccgataccacctatgagacttccttgtgatgccagcgttatgttccttccgcaccattcaaactatcagcgatagatagcctacgggagcaacttctggtcgaaactcagctacactaaaacgaggtcaaagaactgacatggaggctcggaggaggcttcacgacacgaaacaagcatgatgtccttcagttggtcttgctgactatgggtctccaacaagagcagcttctgctcaacacctgccttacaccagaaacaaaaaaaaaccgacatggagggttcaagacgccaagcagccatgtcctcgacctgagcttttgctcgacacccaactaaaacaaaaacgatgtcgaaaaactgacatgaaggctcggaggaagattcggggagcaaaacaagcatttccttgaactacttttatcatctcttagctataggtttagggggatagtttcatatctgaggcgaatggtgcttattgtcaatcttccttacgtagaagtcacggaaacacacctgaagcatactccttgagaagagattgaaaaatataccacggaaggctagtagagtaatcaaagattattgttgtattatacataaacaaaacccaagaggtcaaatgggagctcaccttgttgcgtttgcaagtcgttagggtgcgagtctgtcacgtgtggtcacgtttcttaccgactcagtgaataataacacgtgacgcttctcttcagcgaccacaagtcaaataagcatcgaggacctatttcacacactgtaccttttggtggactggctaaataacccattattacgatggaacatattgcaatatgattacttatcgttcgattaccaaaagttgtatacatggaatttatgctctgcacttgagtgggcgagtctatgcatcgattcacaccaagtcaccgagttgagcggcaacagccatagcagaaacaaacccccatagaaatgccaacaacatacgtctcatctacctacatgacacaggataaaaatatccgtacggggtacagacatgatgttagatcaaccagccctcgctgtccggctattggctctcagtcgtgggcggctaagcgcccatggaggctatatttggctgcttgtccactccggcgctttcgacactcacagtagccagtgagatgctttgatacttcatgaaacaaaccgttgcacagaccccttgtcttcaggctttatttttatattttctttgtttcgagatggttatggttcactctgattggggctgtctcgactatacggggttgccaaggtccatgaagctgcttctttatgagcaacattgggctaatgtgatgtctgctgccgcccgggatgctgaccatttccaggtgacgttcgtcgcctgctatatttgaagattcattgtcccttgttttattctggttctattgttctcagtccacccggtctattcatctattgatgccccctttcattcaacgtctataagaaatcatatataccatgtccttccactagctcgactttttcctctgctctctttatcatcctttgagaaatctccattttgatgcaggctttgcatatttccttgatccaactacacctccaaacattcctggtcctcgctggacgatatcacgcctgaaacatttgacaaatataaaaaaagaatccttacaatggtattcactcgaaccggtcggtcggtctttccactgctcccgccttatggagctcacgattcaagcacggggcggataattcccctacatccagatggcctcactccctatctcggtctgcaagctcggctttcacaagtatggatcaatcgatggacaatacttctactgcttgttctcttccgagtgttgattgcagttggcgacttgcagtccaacatggcatccgccaagcgtgaggcgctctctgcatgcacgtcagtggagtctatgggtagcgcgatggcgtcaatgccatactatctatccaagggtaccaacgagcttgtggcttcctcggttgatgaggctgtttccgccctgaagtccgtgttgttgttgactatcacgggcgtcggagagattctatggttcgtcatcaatatgatgtactctacctacgcctgtctcattacgatggccgtccgtggcacggtaggagccggcattgaattgatcaaggaagctactgagtggatcaacaaaaccctcacgacaatcagtggtgacattgagagtaccgtcgacaaatacaaggacgaactcaactcatttctcgagacaatcaataaagttgccagcgtattctcggacgatcctagtccaatcgacctcaacagctcaatcactacgctggagaatctgtctcttccgtcgtcagtcaaccggacggtcgaaaaattagacagccttgtccttcccaacttcaaagagatccagaattacaccaagactctcttcgaaacgccctttcaagaagtcaaaaatttggtaaatgaaactttgggcacttacagttttgatcggtccgctctcccgatccctgccaaaaaacagttgaccttctgcaacgacaacaaaggaataaatgatttcttcaacggagtcactgcgctggcactaaaggcacgccaaatattcattattgttctcgtcattgctgccatattggtgtgcgttccgatcgcgtggcaagaaatccgccgatggcgctcaatgaaagaacgctcccagttggttcgcagggaagcccacgatccaatggacgttgtctatattgtctcacggccatataccgcctctgcaggcatcaaggcagcaagtcacttcagcaacagccggcggcagatcctcgtgcgatgggccattgcctatgcaacatccatgcctgctcttttcgtactggctcttgcattggcagcactattttcttgtctgtgccaatacctgctcctgcattcggtgaagaaaatcgttcccgcactgagtgccgaggtaggagaattcgcagacaaagtcgtggacgcactggaaagcgcctcaacagattgggctaccgatgcaaacaaggccatcgttaatcttgacaccgacctcaaccacaacgtcttcggttgggtgaacagcagcacgcaagccataaacgggactctcaacttcttcatctacaacacatccagcgttctaaacgagaccttcaaaggcacccttctgcaagagcccgtctacgagctatacgagtgcctcatcggcctcaaagcagaggccctccaaaagggtctaaactgggtagccgagcacgcacacatcacccttcccactctcccgaatgatacattctctgccggtgccgcctccagcataaacgacacctccaatccctccgatagcttcctcgccgatgcaggcgatcaaaccgctaacaaaatcaccgaggtcgtcactagcgtgatcaacaaactggaagcaggcctgcgaatcgaagccatcatcgccaccatcattctcttgctttgggtgttcatcgccttgattggtataactcgcgctatgatgcttttctggacgcgcgacaaacaccgcggcgagggaggcaagggtcatatcctagattctgtgcctagaggcggaccaccaccccatgatgcgaatgggtttgctgaagttccactcacggctattccgaggaatatgtctgcagatgggcatgttgctccccagtatacggcggcggcaccccccgtgcccgtgcggagtgagccgtcgtcatatggtaatgagaaggttggttttgcaggggaaagggcgttgcagttggactcgggtcctgatctgaggggaagtagctatgttgaatatgatgtgaagcgatgatgggaaatatattcccgtcttcttccatcttttttttttttgatcttcgctattctcgagaggactatgctctttgtcctccccctctctctttgtgtcatctctggcatttcattggacttgccttggtcatttgtttccatatgtggggtgttttctgtcataataattctcagtagaatatttgaaatcaagaatgccacttgatttcaaaaatatgcaagtcgtgttgaacatcatcttaaatcatatctcttctcacatctcatacaaaacaccttacgagatcggaattcataaacaaagatagaaaaaatatcaatgtactcgtctgtctggatatgctaaacaaaaacccgagaaaggcataatctcatacaaatcgttacaaatgcacaaccactatatggcaacaaagaaactcttttccccctccttaggatgcactctcacgcgctcgatgatcggatccgcacaactaacccgaatccgctcgggggtggcaggggactccaaagagagcacgtcagtgacgttccactgcttacgcgccgccttcaaagcgtcacgaatagcaaagaagaccgcactacccataaacaagggcggctcgccgacaccccgcgagcgttgaatcgtgcgcaagttctcccactccacatccttaagcaaactgacattgaagacctgcgggatatcacggaagccggggatcttgtagtttcccgggcctctggtgaatatctggcccgaggctcggtgccagagactctcttcggtggtgaagagaccttgtccttggacataggcgccttcgatctggccgtagtccactgaggggttgatgctgcgacctacgtccatctttatgtcggagcgtagaggcgtccagtcaccggtcagtgtgtcgatttggacttcggatgccgtgactccttgcgtgaagtagaagaacatctggccgctgttctcgccccatacgtagccgatatccggggtgcggtagtagccttgtgcggagaggttgacacggtcgaagtaggctgcgtgggctagttctttcatggtggcgttgggcatcttctcgcggaagggacgtaggcgtttgtttaattcttcacaggcattgaaaatcgcgtagccgttgagatcggagcttgccgaggcggccgttgaggaggcattggccactgtgttggtcgctgtttccgaaatgaagacgttcgactgcggcacttgcagtgcttcggcggcaatcatggtcatctttgtgtgaaggccttgtcccatttcaacaccaccatgtgctacgaggacactgccgtcgtggtagatgtgaaccaaagctcctgcttggttcaagaagagagctgtgaaagaaataccgaacttggttggcacaatcgccattccgcgtttggaccacttgtgctgcgcgttgtattcctcgacagccttccgacgctccttgtaagagctctcctctagcacttgcttgtacatcaaaggcacgtgccaatctttgagaggctggttgaaatgcgtcatctcacctgccttgtacatattgatggcccgaatctcttcggccggaatatccagacgatctgcaatctccgatatataacactcggcaaagaacaagccttgtgggccgccgaaaccacggaaagctgtgtttgatactgtattggttttgcagacccagccgcgcacattgacattcggtattttataaacgttatcaatgtgtgacaagcttcgctccacgacagcaccggatagatcttgcgtatgaccgccattggcgtatacatctgcatcaagagcaaggagttttccttctttcgtcacaccaaccttccaatggcagaggaacgggtgccgctgaccagaagtcaaaatatcttcatcacggttgagcatacatcgcacgggccgtcttgttttcgcagcgccaatggcacaaataccagccagctggatagatcgagactccttgcctccaaagccaccaccaagtcgcttcacgcgcgatacaactttgttcgcagatactcctgtcacctgagcgacataggcttgtctgtacacgcttagcttaaattctgttataagacagagtcaaatatatcgctactcacgtttcgttgggattctgggtaccactccaaatctccatttcaccatcctccggctttggaatcgccacacatgcttgggtttccaggtagaagtgctcctggccacccattcgcgagactccagtaaagacgtggtcagcttttctgaacgcttcctcggtatcaccatttttgatcgagcgatagtggtcaaagaaagacttcgcctcaatggcctcctccatcgtaaggatactcgggaggtcttcatattcgaccttgacagccctcataccttcctcggcgattttggcactggtcgctagaatggcaccaatcggttgaccagcagtaaaaacttcatcgacggcaaagaaaagctcatcggacttgggttgtccccaccaatttgctttgggattcggaagatccgtgtggttaatgtagtctgcaacacctggaatgtccaatgcagcggacgggtcaacgctaaggattttggcatgaggcttggtggacagaaccatgcacgcgaataactcattctgttgcacaggaatgtcatctgtgtattgagcctctccggtggactgcttcaacgccgcaacatgcggagtcgctcgtccaagaatcttctgttggtaggcgacagagctttcaaggtctttagctcctgtagaaattgctctttcaatctcagcaacaacatctggatctaaatccgaagccttgacatcgagttctgaaagtacgtcgtagtaaaatctgtagaagaatcccagagccaaagacttccgataactagccataccaccaggaactccaaatggcaggttgaaatcctgctccagtgcgctcatgacaccctctagagttgcggggttcgtgaacttcttgccaaccaaaaacgcctcggcattctttgctgagacggtcatagctgccatgccaccaaacacaagattggcgctgaccacatcattggtcttagaaagagtcacgcgtaaggcggagttgacaatggcaatatcatcgtccttccgcttagattgcttgtaggctcgaatgtgctctccctgagccttcgcggctggaatgcgcaagctagcaatgatcgcgttgggagcgagggcagtctttctgtatccttggaagaattcggtcattggaatttcagtctctccttcgagggattgggccacgaggatagtgttagtggctaccaaaaccggattaagatcagagatgggcgatgcagtggccaggttacccgccggggaagcgacgtttcggatctgtcgcccagcgaaatagagcaactgcttcttgattgctttgaaaggttggcctctgatatcgccgtacttttctaccgcttggtcacagatgtgttcgaggtctgttaaagacacatttgcgccgatctccagatagttgtcgtgcaaggtatattgtcgcaattcggggatatctcccaggtagacggaggccgcgtatcgcattgccttgaacttaacctcaatctgtgtctccgtgcttccgccaattagtttagcatctgggtggacgctcttgatcagcaacaattgctcgacggtcaccggtcggtaccacttcttcttcttgttgccatatgccaagggtcggtattcgtgtttccgcagggcgacagggaagatcaactctgtgtctggactgtacggcttgaattctggcgcagggaacttgtaatcgacagtctcaatctcgccattcttggtggaccctttgcagcagccaccggatccatttttctccatacagcagcccgaaccaccattcgcagaggcttttccgcagttgttggtcgagttgaagctctgggcagcatccagaataggtctgtaacccgtgcagcggcaaaggtttccatcgaaggcttcttcaacatcgtgttccgagggagatgaattgtttcgtagcaaagcataaagagacttgaaattattagtcaacctcggatcccttcaaaaatggaagccagcgaaaggagcataaaggcgtaccatgactattccaggagtacagaaaccacattgacttccattgccgaccgcaatccgctgctggatggcgtggggatctttcacattcccaatcccttcgactgtgataacgtgcttaccatcaatgctaacgagtggagcgatacaggcattcacggaggcatggtagattttcttcgttgtcggattgatatgggagacgacctattgacggtataacgctctagttagcactatgtatatgcataacccgatatagttgactgaaacccaccacagtgcaagcaccacagcctccctcggcacatccgagcttcgtgcctgtcaacccaataccccgcaagtattcgagtagagtcacttccgggtttatcgtgtctagtgcaaccttggtgccgttgagatagaaccgaatagtgtcatcccagtcctcagtcaacgcagacaggctgatgggcttctcgactgcgcccgtggactccgtctccaggattcccggcgccatagtggaaatgtggggtaccgataagtagagataagctttcaagggcgacttgagatgcgcatcttttagaacgagttggcttcgacgtggatatattagtgaagtctcgagatgtcagtattgtaggaggaaaggtctagatgaaatcagatctccaaaactcggtaatcaaaggtctttaggtccaaggtttccaaggtcgttatctatgcggggatcgccactgtccgagcagtcggatgaccatcggattgcgcgttggaccaatagtttggctggaattactagttgctaccaacagtatgtacagagcacatatttcacataagctgcatgtagacagctagtcagaaatagaatagacagggccttgggattaaatggttgggaacaggcagcgggagagctttcccatctcttccacctttgaccttttctatcgcgcccatggatgcccagtcttggtaaagctcttatcatacacagtggatgatttggctaactcacacaacatagatgatctaatttggcgacaaatgtatcgccgtgacgaacgatacgctgctaaacaagattcgtccgaccgtacaccgcttagaactcgcggagccccgttttggacttccagaaagagtcattgtcaagcaacaaaaagacgaacgggaagctgagttctgcagtgaaatatcttcctatactaagttgcagaagcttcaagggactgtcctctcagttctattttggcgaaggctctttcaataggcgtcaggccttgatcctttcagagattgaaggcattactctgcgcgagctcgcgaaacaagtcgaatcaaatatcgaagaggagactttggagttatctcttgagaatgctttcggggagtcttacaagctcggagctgagcattatgacctgaacctaggtaattttctgttctgtgccaatggacaagtggtggttatcgatcttggagatatcgaatttcatgatagacagcaagcttgggaactcagcctcagtatgggctgtgcgtactatctgatgagcagattcagagatgtgagatatccaggtcgtcctccatcacctgttttgtactcagaaatgcctgttgccttgggttgcacggggcctatgagctgctgtgggagccttaggaaatcgaggtttgaacaatagcctgcaacaatcccatatcatcggctgattctctcaatattcgcgactattccgaatgggtcgcttgacgtggagggctggctggggcagtaggcaaaaagtggcaaggcatgagcactaaaaacttcatacgtactccgtaggtaaggcttgaatatctgtccagttaaatttctatatttgaattacgccaaccaaaaaaaaaaagaagctacaatacatatatgaaagaaatggttcgtagatggtatccccataaatgcgcgctcacggtctcgagccagcaaaaggtttctcttcatcttcccacttctgccgttcaacgacgcttcgagccctgtagaatgcgggattagcaacagcctgtgagacattagatacaaggcaacgacttaccgataggccttaacaaaacgccaaacctctgtgtctgcaaggttccaagcctcgacaacatctttgatattgatgccggtcgtttccttattcttaattatctcgcgggccttttggatgagttcatattctttgccgactccttgctcgcttggcgtgttatcctgcgcactcttggtagactctatgtcgttctcagtggccggatcaatcttacccccacgagggatcttgaagccaaactgccattcaaactcgtccaagagctctgccggaagactctggcctgcctctgcaggaagagattccactgtcatccacaacgaagttccgacagcatcttcgcctgcgacaacctgcttgaagatcactccccggtatgaagagcccaattcgggcccaaggtgttttttggtcacctcagagagccatgcgtcgcgctcggtctcccggcgaacttgtgctgtagtgatctgctctgagttcctctgaaggctgataagagtgtagggatgaggaagggtgccgatggtgaacaagaaggtggtgtttttataggtcgaaggctggctgatacgcatgggttgctttgcagtcccagacccgcatgggcggcattcggggtcattgggtggacaggagtcgggaatgggcgactccgggcactgaataagggcctttgccagcctaagagcaggctccaccagggcagtagtgtgttgagggaacggcttcagcacagccagcccggcggggaaggagctatggaatttattatggaggtgggcgttgatcagttggacaagagccaactgaccactcgcagcgttctcggtcatcttttcgtgcacggcagagtagccagaggtaatggctgcagatttgtagaacgccaaagcggtcggcggctcaaccttgaacgattccggatcaatcagatcaacgaaggactgggttttatcatcgagcttcaggactgcgctttgaacggctgcatcaatctgcgacttttcagccgcgtaaaggccattcttaaggttttcaaatcgggtaatggactctgggatactcccccgccgaagatacgacagcatgaaatcatcataacgcgccatggggaagcagtggaaatccgcgagcaagcccgtgcccatgtgcccccacgcaagccaggcgaacacctcgttctgagttttgggcgcgagtttccacttctggacaatttcgtagttcgggttcttcattgcatcgcccggagtcaacaccacaggcttgaatccttgcgcgaaccatgcccgacgccacgcgaggagcaattccgcatcggcgctctgcaattccttgagatccttgccattggctttgttggggttatatttcgcatcgtagtatgtgtagatcggtcgacgttcgcgaaggggagggaggacggagcgagtctcatccaacgtgatggcagaggagaatgggttcaaccattctagggtgctgtaccatttcgactcgccgtgtgtgctgttgttctgttcttcgggctgctcatgggagggagggcggaacgagggtaggtggaagttgcttaatgagggtagctttggtgtgggcacgaacttggccgggcctgtggctggttgctcgccgggatcagggatcggagatgacgagaaaatgaagagtaaaagcgcgacgaacacaattacagacaggagggctgtactcctgtgaggaatcatctttctagcattcaaaccagaggacctgtgtagaggcccgtcaaaagttgagaaaacacgtgtgtctttaaactgcgacacttctcctgaaactccacccggatttggccaattcagtcttggcgaaagaatgacgataggtatgaagagaactcagcacaacttctatctgaatctcttgctcagaatagaatccactggcttctaatgatgagccaaatgcaaaatagaacctttgataacaattttaggagctaggacggggatggtagttccttactttgagatcaaaaagaaatgatgactcagcgagcctattataaatgacctcatagaatgagacctgtgaacctctacgacatagaaactcttaacaaccagatttatgctcaaaatattccggtatctctcttaggatgatcaagatactttacaattatgttcctgatcatattatattgtgttcgtttacaagcaactagtaggaacatatttatgtcgctgtatgtagctttgatctaaacccgtacagctagtgatgtgaaggctttgcaaagtgagatatacatcaaggatattccaccaagttatccacacatatcttgggctggcatatgttatgttgtatgttgtacattcgtcttctgtctatatgccctcttcaccagaatgagacctctgcgatagttaaatgtctactcttagcaccccaagaatggctgtatagagcaaaatagtctcaacgttgtcaatgtgagtatccaatggaggaatcagacaaagggaatgagtatacgtagatctcctgtactcctccagttctgccaatctgtgccgctcttggctggaaaaaccttaactccgacgccaccccgctgtccaatcttggcaggcggtgaaccctctgtggggaaaacagctgatcagcgcctcaattctcattggcagaaatagcggcgagatcggacttttccgctcgttatgggggggtaattttaatattgagtcaccgtatcttccattctccaactcttttgaatatactgcaatcatggctgtgggaacagcctctttgcaggaccgcctggagatatgggcacaaaggttgaacaatctgactgtttccccattgacccgagattatcccgatacaaaagagaccgacggcaagagagtcattgaagcttttgagtctctgcgattccccaaggagaagcttgaggcgtcgtcatccggattcaccgctttcttaactgccttcattatactggtagcgcgattgactggtgatgaggacatcgctgtgggcacaaactccagcgaggatggccgtgccttcgtcatccgagttcccattgatgcctcggagtcatttgcccagctatataccaaagtagacaaggttcgtatatattttacttgttataggattcactactaaaagccttgcaggcctttaaggaggggtcttcccaaatcgtgcccttggtcagccttcgctcgtatatacaggagaagtccaagtccgaacgcaccccggtcctctttcgattcgccgcgtatgatgcccctgctgcctcccaggattaccctgcaaacaccttcgataccactgatttggtggttaacgttgcaccgggttcgaccgaggtcgaattgggcgcatactacaatcagcgtctcttctcgagtgcccgtattgctttcattttgaagcaactagccagtatcgttcgcaatgctgctgccaagccggacgaggctatcggacgtatcgacttgatgaccgaagatcagcgcgccctcttgcccgacccaacatccaacttgaactggtctaagttccgtggtgccatccacgacattttcactgccaatgcggaaagccacccagacaagctgtgtgtggttgaaaccccgtcaaccagctcccctcaccgccagttcacctatcgccaaatcaacgaggcctccaacatcctcggccatcatttagtacggtctggcattcaacggggagaggttgtcatggtttatgcctaccgtggcgtggacttggtggttgctgtcatgggaattctgaaagccggtgcgactttctccgttattgaccctgcctatcccccagaacgtcagaacatctaccttgatgttgcccgtcctcgcgctttggtgaacattgccaaggctacaaaagatgcaggtgaactttcggacatcgtgcgtactttcatcgacgaaaatcttgaactccgcactgaaattcccgcacttgctctactcgatgatggaaccctcgccggtggatccgtcaatggtcaggatgtattcgccaacgatgtggcactgaagtccaagcctactggtgtcatcgtcggccctgactctattccgaccctgtctttcacgtccggctcggaaggccggccgaagggtgtccgtggccgacacttctctctggcctattatttcccttggatgtctgagactttcaagctcaccccagacgataaatttactatgctgagtggtatcgctcacgatcctatccagagagacattttcaccccgttgttcttgggtgctcaacttttggtgcccgctcgtgaggacatccaaaacgaaaagcttgctgaatggatgcagaagtacggtgccaccatcactcaccttacacctgccatgggtcaaattcttgtcggtggtgcctctgctcaattccctgctcttcaccacgcattcttcgtgggtgacattttgattaagcgagactgccgctcactccagggacttgcgcccaatgtcagcattgtgaacatgtacggaacaaccgagacccagcgcgctgtcagctactttgaaatccctagctacgccagccacgagggctacctcaacaatatgaaggatgtgattatggctggtcgcggaatgttggatgtgcagatgctggttgtcaaccgctatgaccccactcgtctgtgtgctgttggagaggtcggtgagatctacgttcgtgcggcgggtcttgcagagggttaccttggttcccctgaattgagtgcgaagaagttccttaccaactggtttgttcagcctgaagtctggacagagaaagaccaagccgaatctaagaacgagccctggcggcaattctacgttggtcctcgtgatcgcctttatcgcagtggtgatctaggccgttacacgccatctggagatgttgagtgctctggccgcgccgacgaccaagtgaagattcgtggtttccgtattgagctcggagagatcgacacccatctttcccagcaccctctggtccgtgagaacgtgactttggtgcgaagagataaagacgaggaacccacgttggtcagctactttgtacctgatatgaacaagtgggcatcatggttggagagcaagggccttaaggacgatgactctgactctgagggtatggttggtctgctgcgacgcttccgtcctctccgcgatgatgctcgtgagcatctgcgcagtaagctccctacatacgcagtgccgaccgttatcattccccttaagcgcatgcctctgaacccgaacggcaaggtcgataagcccgcacttccattcccagacactgcagagttaagcgccgctgcacctcgccgccgctcatccgcggtgcaggccctctctgaaaccgagcgaactctggctgaagtctgggccaagctcattcccaatgtgacatctcgcatgattggaccggatgactccttctttgatctcggtggccacagtatcctcgcgcagcaaatgttctttgagcttcgtcgtaagtggcgtgttattgacatcagtatgaatgctatcttccgcagcccaacccttaagggctttgctggcgagattgaccgcctgctggcaatggaatcattcgcgatgagcgatgagaagactctagctgtggaagctactaataagccggacgacgagtactcgaaggatgctgtccagcttgtcagtgaactgcctaagacattccctcaacgtaccgagtctatgctcactagtgaacccacggtgttccttactggagccactggtttcctcggcgcgcatatcctccgagacctacttacccgtaagtctccttccaccaaggtggtagctctagttcgggcaaagaccgaggagcaggcacttgagcgacttcgctccacttgccgcgcgtatggtttctgggatgaagcatggacctccaagctgcaagctgtctgtggtgatcttggaaagccgcaattcggtctttcccagtcagtgtgggacgaccttgccaaccgcgtcgatgctgtgattcacaacggagctcttgtccactgggtctacccctatgcgacacttcgaccggctaatgttcttggtaccattgatgccctcaagctgtgcgccagtggaaaggctaagcagtttgcctttgtcagttcgaccagtgcgttggataaggactactacgtccaagaatccgaacgtatcattgccgctggtggaaatggtatcagcgaggatgacgatatggagggcagcagagttggccttggaaccggttatggtcaaagcaaatgggccggagaataccttgtcaaagaggccggccgcagaggcctacggggaaccattgtccgctctggatatgttcttggtgattcggtcaccggaactaccaacaccgatgatttcctcatccgtatgctcaagggctgcattcagattggccttcgccccaatatcttcaacaccgtgaacatggtgcccgttgatcatgtggctcgtattgtcattgccactgccttccacccgcccgccacgggcgttaacgtcgctcatgttactggacaccctcgtctgcgctttaaccagttcctcggtgcgctagagctctacggatacaatgtcccccaggttgactacgtgccttggtccacttccctcgaggagtatgtcaacgatggcgagcacaatgacaaggagtctcagcatgctctgtaagttacactcctatcggtccgttactgaatacaaactaaccttctttagtatgcccctttaccacttcgttacctccgaccttccctccaacaccaaggctccggaattagacgacgtaaatgcagccacagctctgcgtgcagatgccacctggtcgggcgttgatgcgtcagccggtgctggcgtgactgaggaattagtcggcttgtatgcctcttatctcgttcaaaccggtttcctgcctgcaccgaccgtctccggcgcccgccctctgcctgcagcgcagattagcgaggaacagaagaagaccctgttgagcgttggtggccggggtggtacatcttgaaatttataaaaagaagcacatgtacttatgtattctgattttaaaaagcatttacatttctcatattctttaccacccaccctcgtattcaaatgagcgattaaatgtgtggcttgtagagtacatatacaccggattttaggccgcgtaagttgggtttctgtttccgctttagtgctcatcccttgccgctttttgctcactgagcaccctgatcatcatataggccggatgaacggggtcccgaggtcccgaggtcgcccgctcactacggagtactgaggagccctaatcccactcattcactgagcgtgatctgatcgctctgacttactcactgagcacgactggattattgaagcggagggaatctacagtcgaaatgttccgaaagccccccaaaaaatagactatacactaaatccgttaaataaaaggctatcataaaagtttactatcttcacgtctcacacatttacgcactctgcatgtatatgtactataaacatatccaaaatagattcgagttagggccttcaaatcaatacacatgattgatcaatggcttaacacctaatctagtaggactggtgcagggagatcggaagactgtctgcgcgcaatcgaatgttcttctgtttatttgcccagacgcccttgcttagatcgagtctgccctcgtatggaacataatgtggagtttctttccttctgttaatggactcgtactagcactgtggcaactaagcggttctaggcagaccatgaaagcgctgggatcaaggatatatatgatcatgatttcccaccagcgagtcctatctcctcatacctcgtcagtcgatcgagaatacggataaaaccaaacctatattatcatccatcacgtcatcgatcaatccaacaagagaccatgaggaatcccacctgtccccaagatatcaagcccacccgcaccgccgacttccatgagattttggccgtggcaaagctgtacaccgacgcagtccggaccagcaaccctgaatgcattcacaaatccttccataaggatgccactatgtgcgggcacataggtcctgactttgccaatggaccagtcacagaccttttggaaataatgaaggagaagggtccagaacctagtttgatctcccacctgcatatcctgtcgacaacccctaccaccgccattgttgaagtagatgcagaggtggatacagttgggttcagagatcatttatgcatggccaaggtggacggacgctggcaagtcatgaccaagctttaccacttatatgagaagaagcgtgcttgagcgctggctttcttttgttcgagtgaccgatggattggaggtagtgcttgaatgtccgttatatgataggataccatcaatctatgtccattagaaatagcagccagaagttttgctcggtagattcatgattttgatgcagtatttcgtccaaatttatccctctataagcattactagcttattgctatccactccctgatccatcggatattttttgacctccaaagataattttcgctgacataaagtgcggaagtaaagcaagggggatcatcaccgtcaagagacggaaaaattatcctaggcgccgatattttatgcgagatgacccgtcccggcccgactctgtggttttgggtgagagatgtctttttccctgcgggtatgtctcccttgcatattgcatgtcatacactatatgcagtacaatgtagacaaatgtatgttatacgtatttcggagattctactggactgtggaccggtcaccctataacacatctcataaattcgatcattggggaaaaagcaagctttgtgttcagcgtgctgtatctaccacgtagaaagactagggcatgctggccccgacattgatattggcgccatacacagggcttgaatcctcgctgagcaaccagactatcgtccgagccacatcgcccgctttaaccaccgaaaatccttctttcctatagacctctttgacctcatcgctcgtttgagccttgggcataaactgtggcagcaacggagtgtcggttatccctgtgaacaacttcttgttagccccatctagccgttctgtcatggaacaataagagctgtacctggagatacgctgttcacgcgaatcccgaatggaaatgtatctgctgccacgcatgttgtaaagtaggtggaagctcccttggaagttccgtatgcatacacatctgggatatggctcagtgctgcaatactacccacgttgacgatgctgcggtcatcagagggaagcgatttcatagcgcgaacctccgcacgggtgcagtagaaaacaccatcaagatttactttgagtaccttgctccattcctcatctccctcctccagaattgtaggcgagtttcggagcccagcaccctgggcaatgccggcaatgtttgcggccccgtgaaggttaccaaacttggccacgatactcttcacccatttttcaacctcagtgggcgaagtcacatctaacaaactgcagtgcacctctgtggctgggttgattttcttcatagattccttcagctcgtcaaagttcttgcaggatatatcgcccacacaaacagcagtagcaccgcgctcagctagcagtctgctagtggctgcgccgatgccagatgcaccaccagtgatggcaaataccctggatttcacggatgccattgggtcaggttgatttattttgatatgagcaatgatattcaaagtgaaagagaaagggttggagaatattctgagcgaggtattcgtgcccagaaacaaatgtctcccttcttcaatcataatgtagttacttctgaatcgtcatcccctccattgtgtacataaaattctgatctactggccgccagggccgtaagggacttgatttacattctggaaggataaaggatttcctatgtcgcatttctacgcaaggatagccacgctgggtagcattgcatagctagcttataaaaatgaagcgatagattttccgcaacaatatatcgtgcagtaaatggctggctgaacagtacaccgtaatttcctgatcctgaaagagcataccatgacacgatgcatcactcataaacacctcgtgaccttatagaggatgaaatatatagtttaggatgatattttgcatctgcattgcaacgtaagaaaactaaaattcagactattgattagcggagtaaaagcccatgcaacgctcttttcttgtgtgcctcatttaacttcaaattcaagccttgaactagatctgaaaactcatgtggcttatgcacatcggacgtctggaaccattcttctccgtgaagccggtctgggccatcagtaatctgaaagtggttctatcccgcttgtgatacagcttctacggcacttaggatctgtcagtaccaattaattagagatatacaggaatgaaaatagaaggactgtttaataactaatatcttaagattcctcaagaacaagatatcaaagctaacaggctggctacacccatttttgcttctcgtgctctgcaaaggtcctgaaaaaccttggtgggttccccgtcacttcttcgacagaaccgttgagagtttcctggggactatttttgacatcaacttccatcgcagcagacatagctgcaaagtctgcaggcattccaatttcgtcaaccagaatcttggtatattctgcttccgacaaactgtgatgggtgattttcttgccgaggatcgaggtgagaatctccgcaacctaggatgtgaatcaagtcagttttgttcgtcaacaagaagtaggatataatcatcttacctgcccgtatgagaggagctctgggccttgaatgatgtattctgtcttatgcgagccccattctgtcaagcaatggaaagcaacggaggcaatatcatcggctgagatgaaggggatcttgccctctcctgtcgctgatactacttgactctcgttcttgatccatgtccgttgggggtcttccaatagattctctgggaaacaaaaaacagtttagccactctatagtcctaagctatatgttagacaggatgaatcatacccatgaaccacgtcggcctcagtgccacatactcaactcctggtagagagtctagataggcgtggacctgacccatcgagtgatcgcctttctcaatattactggcactgacaagcacaaatcgctggactcccttagagcgagcaagatcaacgaattggatcataggtgggaccatgtccatggtagggggtccaaccagataaacggctgagatcggttgcaatccatgtttaccaatctctgcaaatgggttgtcccacgttgtcttttcataccagttgaaatgggaagagttgtatgggctttcctgtgaagtcgagctagatccaaccaggaatgaagtttttgcagcatcaagaagagccgcaagacgactggccgttttaccccgtcccccaagtacaagaatagtcattgcaaaaggtctagatagtaaggcagtcggaaagttgtcttttgtatagctttcccttctggagaataattgagttggttacgagatattcagacaataagtactcagttgatagctcatattgaaccgtaaagcaacatgtgactaaaaatatgccggtctcacctcatgcttgactatgacgaattcaagtgcagatactatttttccttgtttgaacctgccaggctaatggctaaatgaggtctgcagctcccaggatcttccacaagtacacaaaatacggctccgccaattgaccgccattgaatatcaacatctcatgtatcggttgagctatgtataactagataacggaaagtataccaatcaggcggctatgacggaaacatgcacaatgcaagttagaactgatccttgctgagtcccatttgcgaagacttcctcgtgcagcgccaatacatcctgcattccaatttgagctcatgaagtcgcggtgggctagacgccacattttcggaaagtgatgcaacttttcatagtcgtggcaagctccaacccccttgcatattgaatatgtcgacacatcccatatgttgtagtcaacttggcagctcacgacaccaagcacaaaattcgctacacccaagagacatgtagtaaagaaatacgcgaacttcgaattccatacatttagggaaccccccggttttcaggtgtaccttcctaatcgggtacgtaccctgcttctgcctgccgcacataataccgccttccaatttaacataccacttttgtggcagaacagtaggtacctgtaatttgtatgtaaactgctaacagaactaagtcacttttgtcatattaactaatttattgtcgactgcatcatcgttaatggattaaaccctataggaattaggtagaatatacgtttatttctgatcaaaatgcatgttttttttactatgtataccagaagtgggcagaatatactctctacactggcagaaaatatggcagtattcttgatcgtaccgtattcggaaggcggtactgaaaattcaagggagcggtatcagctagatgttgctattcgaggcatgacggtatacctaggtataacgcgacctggaggattctgctacctatgtcaaattgtccgtgcaaaactccgcaacacaccatcaaagtctcgcttggacatttttctcctgatctatttcagccccctcaacgccctcttgcacccgcgtggccaattcggatgaaaccagagcgaaagtgcgatacactttgtttcggatatcctgacgggtctgcgagactgattcgacaattctctccaccattcgatcctggaactcctgactccggaactcgggaagtatttcataatactcccgagcgaatttgtaatcatcctcatgaggttgagaccatacgtccgaagagacctgcgcaacccactcagcgaagtctttcccgaggctggcttgatactcagcggttgatgaggtccggggagatgcctgcttcgacaatgtcctccccaggcggtatcgctgtgcgtcagggtatgcgaagaggcgggcctgcaggatcggatcctcggaggcctctataccaggaacaagatgagaaggtgagaacgctagctgctcaacctcactgaagtagtctttcacgttgcgattcaaggtgagcttgccaaaaggccgggaagggattttctcaacaccctggggatatgttcccaggttccagtgcttggtgacgtcaagaatattgaagccaagatgaggcgcgtctttgggatcaataacctgaacattcgccgtccaagatggatgatcgcctcgctcgatggcctcaaagaggtccctggacgcaaagtcgggctcgctggaatccatgatggtgccagcaccatccttgaagttgggtccgcgatccgaagacaggaagaaatggacatatttgaatgagccatcgggcataacccatttgaaggcgtgtcctgagtagctgctcagagtgcgccaagtaaacatacgtccgaaatcactgtattgcagcaataccatatgaattgattcatgattctcggtcacgaattcccagaaattgttcgggttgaggcggttggtctgggggtctctccgttgcgagtgtatcatgtcggggaacttgacaggatcgcggatgaaaaagaaaggaaaattgaggaagacccagtcccattccccatcgctggtaaacaacttggtcgccatgcccttcaggtcctgaacgccctcggaggagccgcgctccagaccagtggttgaaaagcgtgttactaaggacgtctttttgccgacaccgaggagcatgtcgatattacaaatatcggagatgtcgtgggtcaccttgtcacagaattaacttctaattccaattcaggattcgaatgcgatttagatagtacctacctcgaactccccgtacgccccagctccaagggcatgaaccacccgctcagggatcttttcgcggttgaaattggacaatacttctagagtatggacatcttgagggccgatgctagaatggccggacgagggtgctttgcccatgactgggcatttcttcgcgtagttgggagccatttttttgctcaatgtattggatgaaagacttcagagtgaactgtgtcgttgagaactcggctttctccgggctaaatactactaaaatccagtatgcagaggtgtaagcccgcagagactaccttttctgagtatcgggtatttcctttctatctctctcttgttgtctgcgaaccctgcattgcatgtagagaagaatatcagctcccaacgtttcgtcacactttcattttggatgtaagggatgaactgcattccatcttgggtctgatcggaatgtagctatacatatccaggatttacacaccgtgtaatacctagtaaaatagcagtacatctctgggcatagatagcccttggaatggaaagcgcataactaaaaaggcttgatttggggagacacggggatcagatcctgagtctcctacatcttttctttttttttttcttcctgtgcatttcgatgtcactatattttagatagactgtagactttatgcatccaattgcgaaatctgagtcgcagttttgtcaccaactcatacaatcaccttttacagggcacattgattggatagatgcaacatttatgttgtaataataagcattcccgatttcacaaccaacttttgtatcgcccattattgattgacgtcaactttggcattcctttaacttcggacgtagccgtacagcacatagttagtgtcttctagcttccattttttcccttgcatatacaattaatttaccccatagtaataaattaccggaggctgaattgtacatttatcccgcataaaccagattaatctggatgcagtaaggtgggtactgagtttcaccacacgcctcttgagaaactgatatcacatgagaagttatcaatctgttgcatttcatcatattgcataataatatcgtgggctgttcacctcaaaaaaaaagatacacaattgcaacgtattcaatatctcaattaggacacatttggagctggtaaaaagaaacatcacagccctcaaccgaccattctttcacatccgtcaatcccgccgacccaaatagtacttgacgctcgtctgtatcatacttgtagctacatccgaaacgaatcttctcatgcttctcgataacgatgtcgttcaatgggcccccaagtctgacctccttgcccttcgtgatgagagaggcttcgtgtcggcctagcatatagttccactcactcagaaagtaccaatcactgggctgaaataccttctcccccattttgtttggagcgaacagggtgtttccatagtccagggacgctaaagcaaaaggaacgacgccttcagcagtgtaggcgcgcagcactttggttggcattttgcaactatccaggctcaggagaatagagctttgaactgggctagcggccaacgcgttgcttgcgatgttctgaagaaacttggctgcatttggccgcgaataattacctactgtcagtccaaacaataggagacagtgcggccggtcctgtactcccggggtatctttcagccactgcactccatcttcgaaagttccatgaagtgcaccaattttgacaaacttgaattgttcgtatgggagggactgcagcgtagattgaagctccgaaaagctcagatcgagtgcatagaacgtgatgttcttctttgatgcctctagtgcttccagtaacggtaaaaccttgtccaggcttctgtacagcagtgttagctatctttcaatagaaatagaaccactcaggtgatcattttactaacgcgctcccaagatcaaccactacactgttattggcaatcgaatcaaccatctcagccgctcgggcgcgtagaatgcgcagctcttcatgtcgtggatagaagtcagcggcggtagagtgttcaatccagtgccgaattccttccccgctgtagaagagaagagctggaagagttttgggcgtagtagacagtccagccgtgacttgatcgggaatggattcctcgaatgtgctctgacgtatgtcaataatgcgtgagttgatgatagtcatattttcggttcctgtattttgctagagaacatgaattgcatcaagaattgattctacaccagactatctgacggctcagccacatttaatcctcatctctggcggtgagcacacgagcatctttgtagtattctcaccaaatacatcgatacgtcacatgtattaaatgagcaagtgagctcagcgtatctatcgccaagttttccaatgatcgtcgtcctgtcctgcacataccctccgagtcccattcctcactacccactcctaacttgctgatcaaaagcccctctcggtcccaccgtcgcttcagctgtaacaggcgggcgtagctctgtccccaatagacctgttggaaatccttttcgttcgggtcccccacgttacgataggataaccgaaacctcgggtcaatggcataaagcaagggcatgtgaatattcgtaaggttttgtaatgcacctgcttttccttcaatagtcggctcaaccggtcgcacgaagttgatcagctgagtagcattcctccaagccggatgcatggacgtctccatgaggtctccatttctcatgacttgccctccgaggttactggtgaacaatagatcgcccggccgcgtggggagttgggccagaccgtcggccacgtatgcaggccccttggaagcattgaataagtcgttagaaatggcgacagtggacccaagaacaccgtagtcgttatcggtgtgaatgtcgggaacctgtcgatagttcatgctgagtttcggcaatgatgttgattcgtatgtcacatgagtttcaatgcgcctcatatcctcaacaaatggctgcattcgctggtcgacatccgccgtattggtttggttcagaaagaacattttaagttttgcctcaatagagtgttcagatatcacagtgatgatcagctgcccaccaacattttcacggttcaatgactgcaggacagtgaagaatgcagcaaggcttcgagaatattcgccgtgagattgggatgtctgcacgccgagctcagccgcaatagcagggacgtcgggaaacactcgcatagtagctcgcgtaacaattccaaaagtcccacctccacccccccgcaatgcccaaaataggtccggattccgaatagcgttggccagaacgatgtctccctgtctcaaggttagaaacccacaatattgtatggcatcaggctctggcaggcttacgctagcggtcacaacttcaaattccagaacgttgtccactgccaatccatggtgtagactaagaaaatctgaaattcctcctccctgcaggaatcctcctacaactccgactgtaggacaatcgccaccgacaacaatgtatccattttgtgcggaccttgcgtataggtcccccatcataacaccagctccaacactcacagctggaccgaaagacttttcaaatccgtggagctgaacattatcgtggaatttaatatcttgcagccggtgggtatggatctgcaatgcattgggcgagctggatcgacccgctagatcatggcccgtgttccggatgataaggcgaagatcgtggcgtttagcaaacattacggcttcttgaacatgctttgtggagttcaccattgccgagtaaagaggaatgcgcccttggtggcattgggtatgaccattcatctgagatcccaatgggcatgcatcaccaggggattggccagactcccatacccaatcctgcaatgcacctggttgatagtctcagctgaggaatcttttttggaggtacccaacgtgagtgccaggcttaccaggttgcgatgccctccatccactgtcccttgacatacgcatcacatcctcgcataaggtgtgatcgaggctatggttgtaacagactgatgcaataggttgtaacctaacaagagtgaactccatcgatctgtttagtaattcccattgttcatccgacggccaacagggttcccacggctggcaacgacatgaagactgtaagaagtgtgtaaataccagccaactgagagctatacctagcccagcagtccccagaaaatgaaacatcattgccgattggtggtggatttctatcaacaaaaagaatgtgcatagatgcggttcagaattctgtaaatccaacccattttatgcttgcattcaactaaaaggcggtggccagccctctagattatttgatgagtttccaatattacggccaagtccgagagcaaagcacaggaacatagttcgggcctacccgcagtgtagatgtaacgtatcgagagctccactatatacgtaaagggtgagaatgaacagtatctcgccatatctacgagagtgttgatataatcaatcatgatcagctgtatgtgtgctttcctgcaagtctttcatcccttgattctacggtgtatcttgcatatttatcctggtttccgtgatcttcatgatcatcgaccattctattcaatctatagccgtattcactgtggaaagatatagtgtcagctttggaaatatatagtgtcagttgtagaacgtatagactgcttcattctacaactattctattgtgttaagcagctgtcactatgggctccattgaaccacctaatgcttctagctgtcttgtataccagaccatcactgagtttgcagacttccccgatcacgatcagaagctatggtggcacagtacggcacctatgttcgcagaaatgctcaaggttgctggatatgatattcattctcggtacaaagctctcgggttgtaccagaagtttatcattcctttccttggtgtctaccctaccaaaaccaacgatcgatggctcagcatcctaactcgatacggcacgccttttgaactgagcttaaactgcacccactcagtggtgcgatacacctttgagcccattaacgctgccaccggctccctgaaagatcccttcaacactcatgccatatgggacgcactcgatacactgatccctttgcagaagggcattgatctagagttcttcgcgcatctgaagagggatctcactgtcaacgaccaagacacggcctacctcttagagaaaaagaaggttgggggccaaatccgaacgcaaaacaaactggccttggacctgaagggtggcgagttcgtgttgaaggcgtatatatatcccgcactcaaatctctggcaaccggcaagccagtgcaagagctcatgtttgactctgttcatcgcctttcccaccagtacccgactctcgccgcgcctctccgcaaattagaagagtatgttcactctcgcggaacttccagtaccgcctctccccggctcatttcttgcgatctatgtgacccacgtcaatctcggatcaaaatatacctcttggagctgaatgtctccctggaatcgatggaggacctgtggacactaggcggccgacgaaacgatacccaaacactcgctggattagagatgattcgggagctatgggacctgatcaaccttcccaccggtattctctcgtacccggagccctatctcaagcttggcgaggtccccaatgagcagcttcctctgatggccaactatacccttcaccacgacgacccaatgcccgaaccgcaggtctactttacgactttcggtatgaacgatggccgggtcacggatggactagccaccttcttcaggcgtcacggctacacccatatgctgcagacatacagggatagcctgcgtgcttactagtgagttgaaacaattctattcactcaacccgtctaacaaaatctagtcctcatgtagatcatgacactgtcaactacctccacgcctacatctctttctcttaccggaaggggagcccgtatttaagtgtctatcttcaatccttcgagactggtgactggccaatctgtgagtcaactttctactcaaattcccatgatcttgttttttaacgcggttttccctcttctctcatctagccagcttcggtgcgcctatccttgagcctgtctctaagaagatgtgtcgtggccatcctgtctctttcgaggtacctttgacaaagcagcaggtggtggccagtgagtaaaagaaaccatatttggcgactttcaggcatagggatgtgaccagaaagaaacactaacgcgaattccacgatatcgcggtatggagttgatctagatgtttttcgaggagatgtgcaatccaattgatgaccggtgtaaattgcaggctagatggtaggagtaggttaaatgatttgctggaatatatgtactcttgattttctgaatattgatgtcagctttgaaatggatgcttcaacgcctagaaatgggtgtatgcggagatttgtatggtgggaatagcttcattttttggggaacagactttgcttattaagccctctgtcacatgcccaggtggggtctaaaataaggcagaatttagacacattcaggcatcaaccctgcaaatcaggcatatgacctttggcagctctgccctttcgcacgcggcctagaatgggtacgtacacgtacatatacaacctagatagtagagtcgttcgattctgaactttcgaaaatgcccaactcgccaatctgcgcgtttgtactactcgaactgattgttttccccagtctttacttgcccctctcacttgagaattcatatagttctaacaaattccttcttcttgctctcctccatatctctcttcactgttagtactccatcatgcttgaaggtaagtgtgtgagcggtgtttttgttgtatgcgcgttcttggcagttcaacttccccggtcaaattttcccgctctgcttcttatctcccaatcaacccgattcagattgtcggagccctgtgagaagtccacgaccggttgttggattaattgtatccttgatcgtctgtgtaatcctgtctttctcagtcggctttcccttcaccaattcctgtcaacccgcctcctacctttttcccctccatgggtgtcgcaagactcaccagacgaagcggtctcattgcgcgcgcagtgtgggattccaagtactcaccgagacccctgctcaccacgcagtctctcgtggcgcgcagcaagatcgctctgtccccgcatcacaccaagcccttctcaacctccccatccctatcctgcgcgagacaccaaagcaccagcggagaaccaccgtcgatcgcggaaccacctgccaagcccaagaaccagacccagactgacattcctggtgcggatcccgcagaccgatatgcagcaggcctgcgcctgaacaaggaatgggctgcccagacagcccgcaaccagcccgagctcttccctaccctggcctcgggccaaacgccgcagattctgtggatcgggtgctccgactcccgctgccccgaaaccaccttcctaggcctgcagcccggcgacgtcttcgtgcaccgcaacattgccaacatcctccacccgggcgacctcagctccaacgccgttatcgaatacgccgtgcaatacttgcgtgtcaaccatgtcgtggtgtgcgggcacacatgctgcggtggtgtctcggctgccatgggcaataagaacttgggtattttggatccgtggctgtttccccttcgtcagctgcgcgagcgcaacctggaacttttgcagtcaatgcctgctgaagaggcgtcgtcgaagctggccgagctgaacgttcgcgagggcttgaacattgtcaagcagaagagtgttgtgttgaacgcgatccgcgaccggggactgcagctgcatggcttggtttacgatgttggatccggtgtgctcagtgagctggacacgcaggactcggaggaggttatcagggcccgtttgacggcttttcaaaccgagtgagttagcggggttttttcgggcttgggactctttcggccgaaggccacgggatgtacggagtagcagaagcgagatttgcggagtaggacatttctggatagcgacagtgtgcatttgatgaattgatgataattgtaaagtaagatttctctttttttttggcctagagggatctctcgttctctcagaatgtaaacatgatggcatgatgtgtgggtagccgatgcgatggaaagaccaatcagaggagacggtgaggttatacgaagtatgtctgccaaattgggaggagcaggtatcttttgtatagcaactccatacaaaaggtacatatacacctagacacgattaggtgcatgccacatctacctatatatgtccatagccttgcttgtcttatgtttcttcttttcagttctgtttgtattctgcaatatgccagtgatctaaggcctagatggtgtaacctcgaccgtttgactcttcacagtccttcaccgacaatagttatagacaaaaaatgacatcagtaccatgttatagaaagaaggttatcaaatatacaggcagaagcaagcaaatggtttaaatcgtaccaaagacgtgtctcatatacatgcccaggcggacaaacatataagggtaatccttcccacgtccaaccttccaccatccacctttcttctctgagtactcttctcactgaaacttctgatccccttccagtttctctgacttgacatccattatgaagatcgaaatctatgatggagttggtggtaagtctatattccttctgacatttgacctatcattcacatgccaacgatcaaagctgtcgatgatagcatcacagaacccgaggtccaagaaatccagtatgagcctgagggtaccctctgtgatgtccgcaccctctaccagaaaagttccgatggttggggccaaccggtatggaccaaagaaatgcccatcgacttgcccgcacccgtcttggatgcagagtcagcacaatacgcactcctcacgaagaaggtgaagtgcttcgacggacgcaggagcttgtcgattcattccgtcgttgtgcaaagcgagcgtctcaatgagttcttgaaagaggcaatgaagggttatcctagtgtcgccctgaccttggaccgccccgaattctgctcgcctttccgggctttcgttcatcgatgggaagaaatcaccaaactgcgggacgaagtgcaggatccaacaaccaaggcccatgtcgacatgttctaccgcatcatggacgaggagctcagggatgtcatcgacagcaagaatgagctggttgccaaaggggtcatcacttttgagttggtttggacaatcatcaaaccggacgatgtgatcctttcttcggccaaggaagggctccgtgcttattcgtccacacgcggatcgtcggacggtgaaggatcgccaattgattatttccaagccgaatacgtcgaattcgacggaaccaagttcggatacaacaccacggatttcatgatcccccgatttgaaggcgctatgccaatcacctcgttgactatcttcccgctcaaattacaccccgcgaaggaggcggtccaggaaatgttgactgcacgaggcaagaagtgggaagccctcaaggggtaccatttcagatcctatgattcttcaaccagcaccaactccaagggtcatgtcaagaatcgcgtcatcattgacgcccaggcatacaacaagtttgcgcaccacaagacaatcaactttgatagggagattggtgaagaactggatgatgctcagcgcctcattgcaaccccaatgctcaacggatatgccctgaatgacaaaaaatggcgttcgttccacgtggatcatgtgcaagacattgattgggatgagcaggcttttgagtcactggtcctaccgcgggagcagcaggggttcaaggacgtcatcttggccgtcgcaaaggcccagtcccagaaaaaggatacatttgacgacgtcattcggggcaaaggccaggggttcattgtccagctcagcggtcctccaggtgtcggaaagaccctgactgcggaaagcgttgctgaggtcatgagggttcctatttatgttatgagtgctggcgaccttggagtcgaagccaaacgcttcgagtcaaagttgaaagacatcttggagctggttcccaagtggggtgctattctgttgcttgatgaagctgatgtcttcatggaagcccgcgattccgccaatctcgatcgcaatgaacttgtctcgctcttcttgagaactcttgaatactacgaggtaagctctgaatttgggcgaagcgcacaaatgacatgatactgatcttttatctttctctccagggtattctcttcttgaccaccaaccgtacgcagaacatcgaccctgccttcgattctcgcgtccacctttccatcgcctacaaggatctcgatgcggaatccaggcgccaggtttggggacagttcctcagccgctcgatgaacattgaagccatcacggatgagcaacttgaccaggtggccaagttgcaattgaacggtcgccagatcaaaaatatcatcaagaccgctggtcttctggcttgttccaaggagcgtgagatccgatttgacgatttgcagacggtgcttgctctgagaaatttgcagaagtgatgcctggtgagacaaggggcatattccgtacttcatgatgtgagtgagatggtagctggttggaaacatccatagacttgatattgaaatccaaaaaagcatgattttatgcgcaattttgtgtctgtaaaaggcggaccggtgaattgcctcttggttagttttgctgtttaggtttagcttctgtaacataactaggatggatactgttatttttcattcttgatacagaccgatcaggtgatgtgactaggattcaggccgaaacgtttgtcttgtttgttgtgatttgattactagtacatttgttttgtccaccagattgtgatttccggactacaacatagtattgtgaatttagagagtttttattgggattattatgccacgtacacacttgcattaccaccgtttatctgtcaatctcatctatttaccacccaccgccttgtctggttgtaaactgtgggctggtactcgtaaagcatacacattttcagacacatgcggcagtgtcagatggattccctgagggtgaggggctgttggcacataacagcttggagaggagagggctggtgagtaccacacttcccatcgtcccccgggggactgaaattgcctcaggaagatggtatcctggtaagtgctaatgagcccatattcgcaattcaacttctgcatatctcgcaggggttacgcgagagtgcgccgaagctctgtcctcatggcagtggccgctgcaagatcatgctcatcgacccacaattctccagcttgattcggttgtgccatttgcgtcttgggttccttcgggcggatgatccaggattctgatccgtaggaatagttttatagatcccactggaagacggattccctatcgggttggtgagtcgtcttggcgaaacaattggtcctgaaggaacgataggttcattgaccgcaatggtagtctcctgatttagccctacaacgtcggggatgttggcatgtacttcctgaatacttataatcctcaaagtagatgtcgattgggtggtttttcaaggctgtcccaagtacatggcctatggcctttgaaaactgccccggagaccgggctcatcagtgatgtacgcccgcgtccgtcagcatttccagtcagagctatcacgcatccagtccaccctgtgagctggcctcaccaatctccaaattgcgtatgtcacatcggataatggtgtaggatctaaggtatcgggatcacggaatccagaaatatgcccagaaagcattagctcaccattatcgatgtttgtaggctgtcgtagccacctacatagatttagtggtggcctcatcataaatgagtttcctcaaacagcaaattgacgatgcccatacatccttttgtagctctcttcttgatattagtactggtatacaaagggagtatatatgatcttacttataagtagcgcggaaaacggaacgtacctcctcccggtattcgagatcacgttccagtaaggaacggagttaatagattcaccggccacccgcgtccacacgacataattgatataacctccagggacgtagtctcttacaccttgcacccggtcaccatgaccaagtaactttgggattgcagtgcagttcttgtgatatagactttatcaagctcaacgccatcgaacaacttgactccgaaggggctcaggtagcgaaaaacatccaccagttaggccatcagaaacaggaatacatagcttggtacaccgacgacgcgacgacccagtacgaggaatacaaagactggataaatgggtacaataaagcccataccgctgagaaggaacgtgagatcttagccagggaacttgctgcccaggttcagtctgtcaaaatggatttctctggggaggttttgaaatctctgctcctccactacgtcccaaacctcgacaccctgacgcaggaggaagcacagcaggattgaccttgcaatcggatttccttttacaccaattttaatatccatttttacaagagccctcggggcgagggcttcttcggaaggggcgcctgttgccacttggtcatgtgaccgggccttccttagtgtagctcgcagactagcttaatcaatcatctcttaccatccacactagttgtaccaacttggtagcatgtcttgagatccacatcagcgggatcccctgagctagaaattttcttttctagtaaaatagccatcggagaccctctgcaaagaggccagtcccccagattccccgacaaagccagccatcactggcaaaatcatcagtttcatcagagcggatggacaaacagctccacagagccatcctcctcgctgtacagctcgataattacatccagctcgaccaaccttgtgctgacgaatttgactctgacacgaagtcaaggatcagcttcctactgagtccccactttaaccatcccacactacccaaagcagaagatccatacccacctgactggtcgattcaccgaccaagcctccataaagcgactgtcgaatttattaggctttcccctttcatctctccaccgatacaggacttatgagagccttgacatccgcgtgggtatgctgagtgagagcttgctgagctcgagcttgaggggagtgataaatagtaccgtcaatcggaatttgatagtagaaccgtataaagctctgttgggtggggtcgaggaggttatggcatgagaaattaagtgccgcaaacggatggccgaggtcatcatcatgttcttcctgtgtcatggtttggaattcttcagacaatttatcatcgaggacaaatgttgcactgggtgagggggaagaatgttcaagcgttactttagtaccgtgtagataatcgaaatctcctagtcgagacattatgatgaatagagagagaaaagtgcgagataagagaaatgaaagagaagtgaagtgcagagagaagagaagtgcagagagaagagaagtgagagagaagacgagcatagcatatccatggatggaatatagattggtaattaatgccttctatccgtattgaccgtattgtaaaatgcaggttcaacttctgtatttctgtatcgactcctaatttgacttcgtagttcgttaactaaccggcctttgcatttttttacaaaaattacagaccctcctaacgtacgacatgtttgcagatgaccactcgctacttacccaacatggaggattgataaattctctggtacaccggcgtcttatactagtatagagcttctccaagagagcaaggtgctatgatgcagaatagtggaaaggcagccgtttctaaaagcggtaacttcggcataattattatcttatgcacacatgcaagttgccgagacctccgcttgccggctaagcaggcaacacccaaacatcctcagccaagacattgacatctcccgtcaataatgcaatcttggcagaacttggaaaccaacgaaataatcaatctcatctccagttttccaatactccggcaggccccgggggtggcccttctccccctgaaccacatctagaacatatagggctacggggctcttcgtattcgcataagcagacggcccactccggtccatacatgcgttatgttgccctgcaatatgacaacaacatggcctcttaaggctgaacgaatgacatttccccggagcgccgatcatcgtcgaaaagcagggtacacagcgcctaaacaccacaccatgacaccccagggctgagcaaagacccccttcaggtccaccttgtgttggctagtgcacccgcacgatccgaccatttgacaattatagccctggcacaattccgatagcatgttgtggagccgagtcaagatctttgtcaccctatttttccctgttttccctttttttttcccctgccccttatatggtataagtataaacggattgaaaaacagtccgtgttgaaagatttcctcatgttggccgcttaagcgctgggccattatgattgtcactcgttttcatcatccgcagcgcttgattttgtcgattttggtgctgtccggtctctgctccaagttgctgcacatataccagcatcgatcgcttcctctataccttttggcgatctatttcccgacattctttattcaggaggtcctgctattcgttacagtatggattctcttatatacaacctccggtcggtgggcagtagccgccgttatcggttcagcgattatcgcgttggttcaccttttccgaaatgcgacgcgcaacgatattgacttctaccctcagatgcactgatttactagcaaccgcgtcgcagtttagtttttattctcagaccggcagcgaaattcaatgggatgcagccaggtccgtgggcgccagtcgacagggacagaagttgatattgagcggactggtgccaatggctgccactacaacagttatcgtcgtggcttcgtggcttatggcccaaggaatctggaatctcatgacccgctggctatgctccctcgcccatctcggagacgccaagacttccgccgtcttacccggcccctcagatttgagaaatatactagtgtcaaatcgacctcggctttggacgcttgtggggactggagtcacgatcggactttggctgattcgcccagcaatcccatacaatcacatgactggagctctgcccttcaccatgctcggcgaacactctcgggctcgtcagatgaccatcgaaacatttccgctaccagaattgctagcggagcgataccgggaaccggaaaatggacactacaaggggtgggcaccgacattggacgactcgagtaacactgcctatggaaaaaataagccagcctgggcgcaaggccctcttcctgctgcattcgagagatggattgtgaatcccgattcaaatacggccgactcgaccattcaaagcctgtccaggagaggcggaaacaaatcccactctgaaggccagaataagacagctggaccgcgacactacttctataaccccgttcaagatcccctgaggataaacaatattgacctggaaccacttggtcctctgcaggaggctctgaaggaccatgccatcccaatcaaccatatcgtctttgtgtttttggaaagcggcagaaaggatctgttccccctcaagaacgattctcgactgtacaaccaaatccgggaatcatatgaaatatacggagaggaggatgaagccgatctgcacgacaagctgtcccagttaacacccgtcgcagagatgcttacaggggagccatccggcttcggcgcttcggtgagctcaccaaatcccggactaggtggtctcagcttcgacgggatagtgtcggggagcagtctctctgcgaaatcgcgtcttgtcaactactgcggtcttggaccgctccccgtggactttatgcatgaaaatgatatcatcccataccagccgtgtctgatgcacatcatggatttattcaaccagcgcaagaattcttctagctctaggaattctaccgatagtcacctggagcgggaatgggaaaccatctatgcccaatctgtcactggggagttccaggagcagactcggcttatggatctgctcggtttcaacaagacattgtactcggaggacattgatgtggaggatgcgaagtatttccatgaggatatggaaaagatcaattatttcgggtatgttatcacgcagtatacccagcaactttcctcgtgtgtaaatactgactttgcatagttatgccgaaaccgaggcccgcccctacatcaaagacttaatcgacgaaacgcttcgtcagaacaagagactcttcctttcgcatttcaccagcaccactcaccacccttggggtacacccgagggctggaaccgagagcactatttcggtgatctccacaaatcacaacacgaactcatggatgatttcctcaacgcaaaccacttcgttgacacatggctcggcgacttaatgggcctgctcggagaagccggcatcgccaacgagaccttgacagtctttgtgggagaccagtacgtgcaattacccaccagtgaccaaagaacctgacatctaaccaacgaaacagcggccaagcatttggagaagactgccccatcacaggaacctaccacaacccacacatcagcaatttccgcgtgcccctagtattccaccaccccctactaccccgcatgcaccttaatgtcaacggcagcgccgtatccatcctcccgacgatcctcgatctcctagtgaacaccaactccctcaacgcagacgacaccgaaatcgccctagatctgatgaacgagtatgagggccagtccctcatccgcccgtatcgcacctcgcacaacggccgcgaagcctggaacatgggcgttatcaatgcgggtggctcgatgctgagcgttgcctccgctgctgtgccctggcgtctcaacctaccactgaacaatgacttcgagtaccgcttcacaaacttgaatacggacccgtacgagcttgagcctatcaccggctggacaatggactctcttgctgcggaggtccattccaagtatggacaggaggcatttgaatgggttcaaaaggccgagaaagttggcatttggtgggttgcggagcggaaaaagctctggaattatagtgatcctgatgagtgaggggtcgtttatgacggtggatacctcatgttttttttttcttctctttttcgtccttggagcgaacttgcatagcatacattctggggtacatgttttgtttttgaggctgtgggatagtttggttccctaatggctttgtataatattcgggttggtagacctgctgtatataaaaaatatatgaatttcgccttttttctaagattccgattagacacttcaatcattaatcagtatctgcgtatcaatcaggcctattcatattattttcactgtggtttccttacaagacttctcccctgactagtagatttctttttcacatcattggggtgtgttggcgacccaaaatatggaatttgtaatgctatccggaatattatttagatttctccttcttttacaagtgagcatatcagatcctataagaagggtctttctgatccaaaagcctcatataagcagacatctccttcagtccaaacttagaccccgaaaaccctttctctcgggtggcattccaagttctctcaattttgatctcctctggctgaatcaggttccccttgtccccaagcgcacacgccgacgcatgagattgaatctcagaagcagccagcaattcatacatcaaataccaagcagcactaattgtctctgcagctgtgatgacaccatgattccgaagaatcatggtatcagtcgagccaagatcttcagcgagactcttctgctccccgcggttcgtcacgataccttggtagtcatggtagctaacagggccagcctggtgcgtcgtctgcgccaactccagcagtccatccttagtgcacgccagtcctgtcgcagggggataatggcagtgcatgacgcttgccacgtccggccgagcgcggtgaatggcactgtggattacccatccggcgtcgttgataccgaacgtgtctcctgtcacaccgtggtccttgatcttgccgtccgcgccgactttgatcagacttgatgccgtgacttctccgtatcggagaccgaacgggttgatgaggaacgagtcgctgccatcttcttccttgacctttgcggtgaggtggttgtagatgttttcgttccagttcttgagttcaaagaggcggtaggcggctgcaagttcgattcgagactttacttcttcgtcggggagccatttgaggattgattgtccgagcattttgtgaactgcgggggaactgtatttggcagagggcacgtgtgttgcgggatcaacggctgttgcataacttcgtggtagggtgattgttgtagtgcctatctttgggatacgggctcggagcgagcctgtgggaatgcggattgcatgtcgaagaaccgatggggcggttgctaaggaggccattttcgatgtccacggtaaatgtggtttatgacggtgtgatgaacgtaggcaactctggcggagatagtgaaaggctgtttgttatgctggaaatgcctactaggcaaggcctttttatacttgccagacagcttcacataacgtaccttgatagctctaccacagatacgtcaccgtgagacaatgaagatatgccaacatctcacaagaaaaaaaaaacgtttagccaaggttgcaattcacacatggacatgctaagcattagcaaggccaatcgggtcgtcgggaaagtcggcataagcttgctccaactaactttatatcatgattacaccacgacccaggcgtggaatcttgcttttgctgaaactgagcttggttgtaacttgtcaggaactcaatgccatactgcatagtcaacggccacaaccttagctaggagagagtgcgttgcatcgattctatatttccgaatttgtctatcaaacattagcaatcggcgtgttatgtactcttcgtcgaataccaatgttggatatatggtcgagtatcggatatgatacccacaattatgtgtccatagtaagtggataccacatataattgaaattgccaccgtagaaagaaagagaattacacatcatcaagatgacccattcaatacataacctgttcagtttcaccatgaaggctactgatcctgaacatcacgtcaaggtgcaagttttgcttgggtgccattgcaattgagagatcacctgatctagcaacaacataagctatttggagtcactaccataaagcgagaccacctggtctattaattgctctatggctggtacccacatcataccctcaacaagcatgtgccaagctgaggcaagccctccatatagccttggatgattgagttaactacggcgcactggcggttggagccgtgatggcagtatccaaggcggtcagcccctggaaatgcaacccattatgaagtgccaagtatgtacacaatcaaaatcaagactcggagaattatgcttatttagctaaatttggagggcgctagcaaaatcggggtctaaagctaacaactttatagtccattttcaatgttgtcgccctgtagacggcgattattaccgacagccgagaagtgctgacgaggcctcatggatttgcggtccacttgaagatctttatagagcctgacggggaaagagcaccgcattttcacgtttcacccccttcgctgcgtcagatgatccaatcataaccgcctttgtttggccctcctgcccctaccattcgcccacgggactgggcgtctcctgcgatccgcacatatcttgccttgtctagaccccagcgatggtgccccttccttttctcttcttcatgacttccctataccacgctcgttaagaatgctgtttttgtgcttatcgtggctgtcatggctgtcatggctgtgccaaaccgcgctggcgcaatattccagcgacgatctcatgtcattcgttacagttcgtgtctaacatcccacaacttgaaattgtatgatcgctaacaccgtgttctccagctccccgatattcgggcagtgaaattcaatgtccagtaccagaaccgcgagcgcgtcagccccggttactggttcgtcgctccttatctacacatcggccccgacccaccgtcgaccttgtacgagcaatatcaaatcggaccgcatatctacgatggtgaaggagtgcgtttacaccagtcccccgcgatacagatcccgacagctgaccatatgtcggtataatagcgccttatctggactggctcgcaacagttcgagaaccgaaacgtgttcgatttcaaagtcgtcaacagcctaggcccggacccacacctctcgatggtcttgcagaactcgtgggatccggcaatagacaccgggtacggggtgatcttgaccaacgattatcaagttcaacgaaagcttcctttgcgaaaggaccttggctcttttgacatccacgagttcaatattctggacgacggtaagactgcgctggtcacggtctacctttctcatgaggttaccctggaggacttcggtcgcccgacagagactacctggcttgagaccggcgggtatgctgagattgatctgaacaccgccgaggttatccagtcgtgggattcttataagcgcattcctttgcccgaaactgtgcattacaaccagttttccccagtggagggacatcctggctgggattatgtgcatatcaactcagtcgacaagaatgaaatcggggactacctgatctcgtcacggtttgcgaacaccatctacctcatctcctgcatggatggaaatatcatgtggcgattgggtgggaaatacagtgatttcgagcaagatttcacgttttcgaagcagcacgacgcgaaattcatcgagtcgaatgggacacaccatatcatctcgtttttgaacaatgcctcggacgaggaattcaatgaggaaaatatatcatcatccctgttcgtcgagttggataccggcgcgaggcccatgaccgccagagccatccggcgctacaaccgccccgatggccagctctcgagactccgcggcaatactcagctgcttccgaacgacaatgtgttcacttgctggagcaaagagggctatatttctgagtatgccgccgatggcgaactcttgatgaccgctaacttcacctcctcacgctattcatcataccgcggatacaaatttgaattcaccggtcgtcccacggccccaccagacatggtggcgtcggtctacggcacggatgcgaccaacatggtgaccacgttctgggtcagctggaatggcgcgacggatgtcgcatggtggaggttctacgcgcaagcctccgaattccacgaccctgtccttatcggcaatacctcccgatccgatttcgaaaccatgtacattgcccgcggatatctggactgggtgtctgtcgaggcagtagatgtcaacggcaccgtcctaggcaggtcggaaatgcaccgaagcaagtcccccgactggaaatctgtcggatacaaagggaaatcaagcccacctattccggccgacccatcgatcgtataccaggcaagcgatagcgcagcagaagacaaggcggttggcgactctggccagatgtcatcggatgcaatcgagacccaaacagagaagaccacccaagtcctcaatcacacatacaatgctatccgcagcattggcggtgttttctctttcgttctgcttctttgtctgtttttcgctgtcatggcatcctatttggtcatccgtggctggcgactccgggtctaccagcgtgttcgtacggaagatgggggttcagaggagcgggcgcatctggcaccgttgcatcaggattgagtctctttggctttgattggaagcatacgctgtttgcattatttgcgggagttttgtacgtcattttctgggtctttgatgggctcttgtccaatgtgtatatagtacttgttattggtttcgccgactacctggccataggggagggggggggggtttggcttttgcgatatcccgcgatttgttcatattaaacctcaactgtgattcagttctgatatgtggaatgaccttgtttgaagtacgatcggcgacagagccaaatggaataattgtttgacttaagggcttcttcctaaacctaggatctcgtgtaaacaaacaaagaaggcgcaatgcatgtgacattgacatggacagggaagatgcgagggagctgtcgcccttaaggaaggcaccgtttgtcgagggtatcaaaggacccttccccccatttctcttctcttcttctccttctcctctccccatctctctggccaccatctcaccgtagcccacgagacagcgcaggcagggggacccgtagcacatgctgcttcacctaccacagggaccatgaaattaccatatgtatgaggtccatgtaggtctgcatcagataacaaaccgggctttctcggggacgttcctgaagtcgtggctctcattgccacttgacgagtcccacggaatacatgaggggtgtaaatcttcgtagccgagggcgggtcgcgtaggtttgacctccatgtaagcatcgaagctcagctacctgactggttaatggatcctcgctcccctcatgtcagcattggaacctccaccagggctgatccacagatgcttctttgatattcgagtggatcccactgtttacaatgagatctaggtcttgaagacatcaaccatgagaccctgcacagtttgagcgttgggaaggattgcatctggccacgatacggtgtactcggactttatgcatttctctcgtgatgcaggcagctcttgtatcggtcgccgaaactcttatcatggtgatacaaacccgaacaagagaagagtaagaaatacccctcatgaggggtatcacttgaggggcatcttgtgaggtaaatctcaactgactattttatgtctcttttgatcgtctattccagagtgtccgtcaggaaatcgagacaccggtcgagaccctgtgttatctcaccttggaagatatcacacaacatacctttggatatcaattgagactgtttacactattggagaggccataggaaagtggtcctaccccttgttccggcccacaaatttacttgataagaactgaaaatgcccgcatcgtacggcgcttattcccgatactgacaaatctcgggaataaaagtcacagcattcccgaagttattcccgaagtgtctttcccgttatctataatgaagtactccccgtacgtactctggttcgactctttctttttcgtcagtcatttcctagagctcaatcttggaacccatctgtttattatccaaccaaattcgcaaggaattgatacccaccatgccctcaacaagcttatgccaagatgaggcctgccctccatacagccttatggatgattacagtgaaggagcccacccacaaatcctggaagctcttttgcgaacaaactccacacagcaagttacatttggaaacgatgaatacagtatctgtgcacgacaattgatccggaacaagatcggttgcaccgaggacgaggcgggtgtcttcttcgttcccagcggaacctccgcaaacctcatttcaatcgccagctgcctaaggccttatgaagctgttattactctggagtctggtcacatcgcctgcaaagaggcaggtgcgatcgaggcgaccggccacaaacttatcctcgtgcctgcagtcgacggcaagatgacgcccaccaatctccaaaaggcgctccagcaaaatcaattctaccctcacatggccaagccccggctactttatatctccaatgcctcagagagtggcactgtctacacgaaacgcgagcttggcagcctctccgcgatttgcaagcaatcaaatatcctgctcttcatggacggagcacgaatcggctcagcaatttgctcaaagaagaacgatctcactctacgggagatcttcgacatgaccgatatcttctggattggtggcaccaaagctggcgccctgatgggagaagcagtcgtcctcaagaaggagctagctgatggcttcgatttccacctcaaacagcatggcgctttgctagccaagggccgtattttcggagttcaattcatggagctcttccgatcagacttattcttcacactagccacgcatgccaatgagatggcccagaagatctcaaacagcttcaagaagttgggttataagttggctgcggagacagaaacaaaccaggtgtttgttgtcattcctcaggaattagttgaaagactgcatgagaaattccgattctatgtttgggagcagcttgatgatgggaactccgtgattcggcttgtgacctcctgggccacggatgagctggaaattgataagttcaatgcgtgggtgcaacagtggacagtggaaacctccagttgaagtaatccgccgtccattaaatgctgccgacaggattcgttacatatttcgttatcactatagaggtaccccatattaacataatacccgactcaataaaaccatcaatttcaacctattcacctacagtatctgcgataaacttgtatcatataggttcctaagatcccgctctatcctcccgactagcaaggacatgaatgcgctaggccttctcgactcgaatgatctacgttctcacaacaagctaggaggtgtcactgatttctaagaagtcgatagtcccaccgtgagcttccattcattacaagctatgctgttcggtgccggggcgcatatgtttcatccaggctacgcatggctggtttccagcgcagacatacagcgcccatcacggctgcagaagacagggccactgccacgtagaaagtatgggtcaatgccttattgtatgctttcagcaccgtgccatattgatccgagggtatatggtcacttatttctgttgcacccatgctcaagacggcctgagcatctattccatcgacctcttccgccagatacctcaccaactcattggtgaacacattctgagcaactgaaaccatgatgctacccataaggttctggcagaacatgatgatcgctgtgccaatggcaatatccgcgacgggtagagcctgggcagttgtcagagcagtttggattcctaatcccgaccccgcaccgaagaggatctggtatcctatccatttacctgcccctgtatgtacctccagtgtacttaggagacctgatcctgtggcgatcaagataacagaaaggcaggcgaagggagcgtgacagcccgccagagaggtgagcgcaccgcccgaggtggaaaatatcacgaagctaataattgtgggcaatgtcatgatacccgagcgtaccggggatgcacctttgattgcttggaaccagatggggagctattgttcgcatcgttagcggcgcgggtcaatgaagaattggcgatacttacgtagtacatcagtgtgaaaaacgcagcgacgatacacgatccgtacattgatgagccccagatattcctattttggaccacccgcatggggactgtgacatgggactgcactttggtgaacacttggatagaagcgaaggcgagaaggagaactggtccaagaactaggagagtaatgatacgtccgctcgaccaggcgtattttgtcccaccccactgtagagctagaagcaagcatataacaccagggagaagtaatgatacccctggaaggtccatctggcgaatcttttctttcatggacgactgagagaatagttgcggttggtcaatatcggcattgggggcgttctttataggtcgaatacaaaggaatatcaccaaggccacgaaaagccccaacggaaggttgatatagaagcaccaccgccatgtcaattgcgtattagttgtgaaggcgccgcctacgagaggacctgcgatggagccaacgccaaatgccgcgctgacaatccccaccatggaagcgcgatgtctaagagggactcggtgggcaaccagcacgaaagatcctgcgctaacacctccactaccagcaccggcaattgcgcgaccgacaatgaatgcggttgaggatggagcgacgccgcaaagcaatgatcccacttcaaagataaacaaggcagccagataaaccgacttggcggaccagaatgagtacagcttgccccagatgagttggattgcgcaaaaggtcaacatgtaagcgcttgcataccaacccacatcgtctagagcatgaaaccggttggtgatttcaggtattgccgtcgacacaattgtactatccaagccgagtagaaacatggacagtgcgagagagaacaccaccagtgatattgcgatccagctggaagtgcaaattgcggcactggattggtctgcttcaggaacatattcttccctatcgactgtaattgatgtcttgctctgcttttcggggtctgctggatgaccatcattggaggtgttgatgaccatgatctgctatgtaggttggttattgctgtctttccttttctttccgacagaacaatccccacgctggtagttacaataattatgaactgaatcgagcctaaaaggggttaggaactttgcatgcacagtctttgttagctaagctattacccaggggcctgtttccagggttccgaaggccaggtcaactccaggggcaaggggcaaagggaaaggtaaatggcgacgtattgcagtcgatcatcgtgattggtcgagtcaatctcatctaatgggaataaagccatatgcaagggacggcatcttctatcctctcctcagatctgtttaggctgaacgggtcgacattcctccttgcagcgtcacgggaacactggaatgtgtgatttggacctactaagcgcgctctattttagcggctgcaagtagacaaggcaaataaaaactatcatggcaattgaaccgcactgaacagtcttctagaagatctggcactgttttttgtctgttttcagtcaactattttggaatacacaagatatgcctcaacgtccatttcatactcggaggctccggttaccgtttatacatgtaccctgcccagacaaaggtcgaagcgtttggtgatacggcacacactaggatccgtttttccagatggagacggtagcacagccaagttcctccaagatgaatccgtttcgactggatagaacccatctaccggatctagtctggtctcgccccgaatatcgtgttgactaggcccgaagatgtcaagacagcgtaccgtgattcttggcagtctcgcagggcgcaaaatacaaactccagctagcttctcggggcgctgatgggtttgggctttcttagtcaagaggatggaagaaggcccatgaggattccagttgggggaaaaacagggagcagtaccatccgcaattttctcgaagaatccacgagtgcgtcccggtaccggctgtagcgatatggccttggccctcgtcaatgcatggcgcagcatgttgtagatgttattctcaaagtgctgctatctaccgctttcacccctgccgcgccataccgccttataccgcttttgtggtaaatagtagcaagacagtagatgcctgcaatttgtatgtaaattcctaatagaattaagtcacttttgtcataaactgcttcatcaactgtctcattaaaattctgcaaatttataccccatagatccaagtcagctgatcgcgctaaccatattcggatactaagatatccgcgtaactcttgcttcttcggacgtccaactgttcgattaatcgatacaaatgattgaattggtacaattggactcctatattgatccgatggcttaattctttcttaatatgtcacatggtacttgacagccagttcttttcaccacagcccactccgctcttccccgtatgtacactcgatgaggctgtcaatatcgtgtgatgcttgtcggtaagcttctatcgatcttatgcgtatcatatcatctaatctttcatgtagtcaggcaaaagtcaaatgtcttcatgaagggcaaccgccctgtcaacgttgcttgaagaacaaaaaccaagaatgcgatttgacagatccccgtgcctcaaaacagaggacacggggaaatatcgtctcatccaggaccccaagaaaacgaaaagcattgtctgccctatctccaatgatagaagatgcagaaagaagcacccctaggaatgtcaccgtggctcaagacctatccaaagatcccatagcagcgctatcgccagcaaccatcatcagcgcagtggaaacctacagaaaaaagttcccaattaccaattttcttcattacccgtctttgatctctgacatatcatccaacgttcactcggtggactccgtctttgtcgcctcggtcctttccttatgcgtgcggtttatgaacagcgatgaactcgaggaagaagaaacctatgccgactatgcacgcaagaacctggcccagcgcgtgcttgaagccccctcgctttatcttgcccagtccctcgtgatgatctcattttatgagtggggcactgggcgaccttatcaagcttggatgtatagcggtacgtatcgaatcgtcaactgatcgtagagcattagctgacgagcagcaggcatggcgacatatatgatacaatcccttctgaagatggcagatgatagcatggaacacaatcctcaagagtttcatgcatcccaaacacaatacgaacaactggtccgaacctactggtgctgctttgcccaagactgcgagctgagctccggggcccgtcagcactttgcgctatcattctctcagatctcggtccctctcccaatcagtgatcgggacttcacatttaatcatactccagccaacaggctgatgcctgctgatatgaataaagactgtctgctagcgaagaatcttacgattgagcatggcctgacaattgtcactcgagggttcgacatattcgtacgaatcctaagatttgctaatgaacatcgacgagcactggcttctttgtcttcagatgactcggctacatctccgctcctcttgacttggcaagtcctcaagaaggaattggatgaatggaggtttcttcaggatgtaacggttcagttcccagctaccagtgttcaatcgcacgtagcactcgggtacggggagctgtttgcatacatcaatctggttcattgcatgaggtattcgtttctgtttgcgcattacaggccgggatactaactatatctcctccagcatcctttttctccatcgggaccgcttcttatccaacctaaagccccattccgacgttttccatgacgcaaatgatgatacccaaggcgagcccgatacaatcaaacagctattcgaagccgctcagcagatcggaggtatcctcaatgcactagacgcctccggcgcacctataatgtcaccatattccggcttcagcgtctttgtcgctgctcatatcaacatgtacggaacaattgccccacagcgatatccgggtggtctcaaacgggccgaagaagaaaagagtcgaaatcttgactatctcgagcgactaagtaaactctggccggttggtcgcagttgggtgagtattgaaaagaaatctctaaccgaatatcacagctaacaataatcagtggcgaacagtacaagaggcaaaccgattctacgaaatagtcaagagtaaccaatcccactccgagtctggaatgcacagccctaggagattcgccctcgcaggtaccctggatgaatatggcgacatccgatctcgtccaagtagagacgcgtatgcgaccagggcgcgaacctctgaatcccgtgatacgcacagttctcatacttgtggaggcacttcatcgtcgcctgctcttggtgaaaccaactttcttcccagggagaatgctgccattggtagtcaccatgattttgaaaccgatatgtttcaatggccatttattgatggatcgtggtcccttgggtttgatgcgggattggatgggttgtggtataactcagggttatttgacccaaatccatctcttaggtgatgttgttccttttcgttggggtgtatatgtcgccgtgtgatttccctacgaactcacaagaagaaatccttttcgatatgatgttgtcgattgaaattttaccatcgccgtagatatatatcgccacaatttgtccgctttttgcatttcgaactttctagtaatacaactatctcattcaataaaaatttaaacaaatcttaatctaacattagaaaatgagctccatgtatacaaagctattaccatttgaatattgtgcataggcgggatgtgcgtggatgtatactttggtggacatcgcttataatggcaagatggccatgtcctcacatcagccagccaagtggccgagcagtaactcggccatcgcattcttccttggtctagtggtgatgatttccgcttgtcattaaaaccgataagcgcgggagaccggggttcgattccccgagggagagatttctttttttttttttcggtttagacttgtttcattaagcttacattgaacaatggatgggagcttctattacgcatagaactgacgcatttaggctgacttatgatggccttgcactttatttttgtgttatttttagccactgctttttttacaatgtttccccgttgtagctagaaaatgacagagaatgatggtggtggaacaatatatgaggctgaagttgtcgctggagtaatccaccttatggatccagggctatatctatacggagacggagacatagctcactccagctacgattctaggacagaaagcatctgcagcaaaaagagtccatagataactatctaaacattcaggttaaatgagaccttccttgcgattccctcgagacgcctagcaatgtcattacatttgcattgacacgggtctctgttaagcgccaatgtcatatgaaccaagtcgtgctccatggtaagaaacacattctcgaacttgtaattgccatcatcttcacggcaccaaaaggcagtattgcgacgaataatctcgctatccggggcccgagcaatcatgccgaatgcaatatctatgatccgatctgtgcgaatagacagatccactactgcctgagagacatccccgatgcgttcctttcctcgactatctggatcgcaccgtagaatatgggcttgggcatctaggttagctatgaagatacggcattcgtgcaagagcttgtcttgccaggatgaggatattggtgccatggttttggtgagtatgcgtgatagactcgagtagacgggggagttggagtatttatattaatatgattggggaggatgacctcggacaatgagagaggccattgttcgatttctgattgggaatacaaaggtatacaccctaacaaagacccaatcttgtctttcttccaaggttagcatgggacaaagacgatcatattacctggatatatgcgtacaacaacatagacatgtcgaaaagggtaaagagaaacagaaagaaaattcattagggtaattaatgagtgggtatataatattgagagatcggccgacaactcctagctcctcccgttaagatgtttccacggtctgtgatacaccacggtcttcctgatgccctcctggtcgttgatagactcagactcaccagcctccggggaccagcaaatgaaatcagatggctctggtcaccaaagtttgccaccttatcccagtcagtagcagtacgggaagccggggccgatttcctatcactcaacggatgggtagaggcgccattgtagtatttctgggacgagtggttcttcttgtagtgggacagtaggacattgaggacagtagacaggcgcagatcaatccaacgcctccctcggcattgctagtagaggttaggaaaagaaagaaagcaagaaaaactgaccaaaaggggatggggtacgacatacccggataagatgacacgaacgaacataaggccctcatcgcttgaaccttgcaacaccatgatcaatcggtaaagactgaacccggtggccagcccaccagcgccaagtaggcctaccacgcgcagctttcgattgcgcgacatttgcaaagaccatgtcaatggcaatgggagaataagaatgatgaggtcactgaccacactaatcacggagtcggcgatcagggcagcggtctggtctagacagcttccttcaccacgtcaccgagccagtatctgggaatgggagcacagatgcgaatcttgacgatcagagcaacggtgtagtagcagcataagcaggcgaggaagatatagataaaccagactttgctgcggaagggggcgaagatgcgggtgagaattgctaggagggcgattttgacgaagagcgccatcggacagtagagaatagtcgcaatatagcagaactttttgaatgcgattagctcgtgagggctaatatcactaagttcgtatcctcctccatgttggccaactagtagagtaagtatgtaactgggaaaacgtgggaagtatagcgcctaccgacgatggatattgcacaatatcccataaacagaagctgcgtacagtcagtcctggccaataaggcactagattatttgctcaacttacccaagcaatggtacaggcaactgagggagtgatcagtaggattgcagtatatgtatagagggagaaactcacggtcttcaactcctagaggatgcttgaatcgaaaccgagtataaaatcgcaagattacgaagatcgtcacgattggaatgcagagacattgtgtaacaagattgacagtatgcaagacatccgttgggttctcgacagtcatgatgggcttgaagttgaagtccccctccccttacaataaaagtaccggggaattcacaagataaagaacttcacatcgtggaaatgaggattgacagaaagacgatccttagcggggacttcaaagctatcgaaccactgctatgtatacttcgtagtggcgcgggatccatgacggtgataattgctcaaggggctgccttagacccaccacttggctcagttgatttctgaatggttcatgaaggatttccatcaataacgctaaatagcgctagactccgtttatactccaccagcatgtaccgacggcatgggtgccagccacccgggcaaataccatagtgttcaaaaagtctgttcccactgccccacttgctatccccctaacaaccatcgtggttttttttcttcttcctacacaccccccaatgacattgccggtgccacccagtcaaagctagcactcgattttaggtactcccgccgaacgatttacaatactttgaaacggttcaaagaacacaatactgttaaatctctcccttgaaccggtcgcccaaggatctttagtgatcgaactcgccatttactttttatactcgcccgccggcaccccttttggtcctataaaacgctgagttgtgctatacctggtcatccatcccgctctactattattaacgttttaaggctaaccggtcttctaaaatataggacaaaaaggaagattctaatcggaaaggaattagctcgacgacgatatcgttttattcaaaaatagcgctctgagtggtctagaaataacgtttaaaactaggtcttctcggatgagtattctgtacaacgaataacaaactgcagaccacaatggtgttggcgctttcggtcggagggctatagaaaagatcttataaatgctaaggtatacattaaagatatttcacaaatggtttagggtacaatctggttaagaagtcgattagagttgattattataaggcgggagaatattattaacccggaatcgaagaagacaggatatactactatttcctatatagatactctcgaagaaggtctacttccattctatcgaccctactctatcttttagtaagataacactcggatccatactactaaaatcacacaggaatggtttaaaactcacgggatatatatagaggagtagctgccgcactcactagatttaaacccgattgaacctatatagcggtggctaaaggttaaactttttgagttatttcctaagctaatatatataggaaggtctgaggaggattagatagtattcaaaaggtatataaagatagcataggatgctattccgcagtcgaagattgattcattgattttaagtatagggcgcagatatatggcagtacagaaagcaaaggggtattatacaaaatattaaatttaaattttacccgagattggcatagggttcaaccctatttaattcgaagtaaattgagtaaagtatggtagtgctatgcatagatatgtagagatatatatttcaatgttcatgggtgaaaatgcgggtgggaacagacttattaaaccccactgtagtatcgattctagtgcctcgtatttccccgatgcagaatttgcacagcggttcgccaccaacaccgttgttttaccagtcaaataaatgggccttagttgaaccctatattggctagccgaggcactttggcagctgtgacagctacgatgtcttgggttaaagatcgacattgggccgaaaaaggagtcgcatgtgtgtttttctccttttctttctataattccgtctgtcctctataattcattccatagtaaagcgacatagaacagaaaagaacaaacatgaccgtccactacctgagcggcaaagactcggatcttttcaaaccactgacgatctccaatggaaacatcaccctcgaacatcgtgtcgtccatgcgcctctgacccgcaaccgcggagagccattgaatcccaccaacaccccggaccaccccaatcgtatttggatacccggcgatgcaattgtggagtattattcccagcgcgctaccaaaggtggtctgataatctcggaagggatccccccatcgctcgaggtaagtaagcatcggacccgatttgatggcataaaccggattattatgtgattccggcattgcacgcttaatgacattatccaaactttaattccaattatttttaactccgtttccacagagcaatgggatgcccggtgtacccggccttttcaactccgaacaagccgcgggctggaagcgagtcgtggatgccgttcatgcgaaggggggcattatcttttgccagctgtggcacgccggccgggccacgatccctcagatgactgggtcgcccgcagtctgcccgtcggcctctgtgtgggattcgccgacggaatgttattcgcatccgcccgtcggctccacccagcccgtgccctacgccaatcacccgcccatcgcaatgactgtggaacacatcaaacagactatcgaagattattgccttgccgctaagactgctatggatattggcttcgatggcgtcgagatccacggcggaaatggttatcttccggagcagttcttgagctcgaacatcaacaagcgcggggatgcttacggcggtaccccggagaagcgctgtcagtttgtgtttgagttgatggagcaggtggccaagaccattggcgagcagaatctggctattagactgtcgccgtttggaatgttcaatcaagcacgcggagaacagcgtgttgagacttggactcacctatgcgagggtctgaagaagaccctcccgtcgctgtcgtatgtcagctttattgagccggtatgttttgtttgtctctatctaatgacatactgctaacccgcccagcgttttgaacaaatcttcggggccgaagagaaggataagttcctcaaaagctggggcctgctgggcgtgaccctggatcgtttccgccagatctttggctccactccgttcttctccgccggtggatgggatgatcaaaactcctggggagtagtggaatcgggtaaatacgatgcgttgttgtatggtcgatactttaccagcaacccagatctggtgtacagactgaaggaaaagctccccatggctccatatgaccgaactcggttctatggaccatttgaggacaataccttccattacacggattaccctactgtggatcaacattaagtgtttcatagagtaaatatagatgttacctaggcagatagatatgtgaaacttggattttaagcataagaataaccgtggaaattctcagccttcaccccgaaaccgagtctagaccaagcccgaccgtaagcgacctatggtttaaatgaatgtggaattccgggagtcagccctaatgcaagacacggcaatatcggcaacattgtgcctcgtgggaatcatttgtaatacggagtacatcgttatgctcggacattagtgatcgactgccgtgatgaagatcgtccccaaacgggctgcaggctgcagctgcactctaccgaggagactgcaaaaacctgacgggagagaaaatcctaaagttgtctcgacattctctaaatttgggttcggcagagtatcagtcgctgttatattgctcatctcgaattacgagctcaaggcccacttataatgacttgatgcttttggccgggaccatactggcaaagatcacccacttcacccgtgcgccttaactagagggaaacggtttgtattacatactcaccaacggcaaggcacagccaaaaaaggaaaaaaagtgggaagcaagcgataatctggagtttgtatcgcacagcttcccttttagtgctagccgatgccaatagccgacgccaaggcgatggcactatgttgtactatatcttcctacattaagcgaacctgcgggccggatagatgtgaaaatgctgcgggaaaaccccatgagccctgaaaatgccgtatggaattttgggcaggaattcgaactgtaagcgctatgaaaaggataccagtgaatgcgtaaatgcggtacgtagtcaggacttacttatagcggtacccgaagcgccccgaagcgccccgaagcctatccgttgataaagaggctaataatctctccacagtatgcaccagcttgccactatcaaaggttatacatagaaaaggtcggttccaaaaattcaggcttttcccgccttttcccgcctttttccgctgtctagaaaactaagaagacatcgagaattgtttttaagaccaaaaagactagcatataactagccaattgttcttgtatgtgataatgctatcagtaatattttattgggagaaagcaattgggagactggctccacgcactgcttcttgataggagtctgacgtcaattggcgcgcgtaaccgactatcatgtagataacagctacattgaggtgatgtatacacttttgcacacgactacatgattatttgacactagaggcacaatacttcgccaccccaatcagcaatcaacgtacagtcactatatgcaatgaccgtcgcaaacgaggagataggcatttcctgcgaggaactatgatgattgtgagcattgggcgttcctcattcctataaagtttagtagaactctcttttgaaatctctttgacgtcctacaggtctctcttgctcattttgcagagatgcttctcccagtttccagagcaggagggatctttgtctttgtccgcatcaagctatttagaaagcttcatggcagtagttagatcatcattgatgtggatcgaggagaagagcaaacaataaaatgaactgtattatgctaactgagtgtgtgtatatgtgtagacaaaaagaaggagagaaaggaagatatggtagtcctgataaacagggtcaggtgacgtgatcccaataatcaatctataagattgattgattattgttgtcactcttctctgcagacacatatcagattgcgatcagtacaacttacaaaccaagcccgtcttacgataatatgaagtgcactttcttctaatcttccaagctgcaggtctcctatcctaggataaactcatggcgtaagaaaacccctttcacattgtagcatcgactctctttgtttgtactgctagattaaaaggaagaacagacatgctcatattctcactgcagaataagaccaggtcaacaggaccagtatgaaagaaagaagcacctccgtttgatccatctgactttacccatagtaaaccccctcctcaactgggtcaggaatgtcccctggccatctgctattgacgctctccatcgccagctcgatctcatcctcgtcagagaacacaccgtatatgtcgaaaagttgaagctgatcatgaacccagatgcgactatcctcagcaaaattatcaatctcaaatttgtgccggttgttcacaacaatcatgtcgtagatatctcccactgtgtatccggggtgcacgctcagagtcaagatcaattcccgctcgggtggaaccaaggtcgctcgtctttcaaacgaaatgatggctttggagccatcgtcaagaatcgtgctgtcttgtgagaagcttggaccacaattcagtctgatcgccgtcatgttcacttccgatgtcgacagaaaaaaggtccagcgatttgcggaattgggatcgagaggtggcaggcatatggctcgaatgcaatcgagaggctcgttcaggatctcatctcgctccgaaagaggtttgaactcgattgggtcccattccataggaaagtctagttctgttagatctttttgttaacatatatggtgatgggttgacatactctggaagaactcattgatcagcatgttgggtactggccacaagggtagagagagaagggaaaacaattctgaaggcttcagccatggcagagatggctagagagatggtaagacatttcgcgttaaaacaatcatgagaatggtccggaccaccttattcatgctaatttatgttctattctgtctagttgacctctcttattaggtcagccctattctatattcaacctctttctctcttgcacaatattcataacttttatcgtccatgaagacgtatacaacgaaataagcatgcaaaaatctcgatggttccaacttccagaacacatacttggtcgctacttattgtatatagcagaagtggcaggagagatggttgcgaaggggtagagcgaccaaaggtcgcctgaatacttggctatgggccttcatgtgaactaaagttccagaggagaagctagaccagtcgccactcacagaatgaaaaaggaatttataggatgttgttgcattaggaggcaaggatgtctactacggtctgtgtgatccctgtgtttgctagctgactgtcctagatggttggtgttgttgtgtcgctctcgtcttgtctgctaggccagactgcccatcgtgtatatccctcttcaatagtttgataatctattatatgattacgaacgccttctttcacggtaagcctgatgcttgatactatataatttccaggttatttacatagttcgaagataaagggcaaagaaatgtagtattgtccaaatcttattgcaatatattcctaggatgtctgctggcagatcaaggctaacgaattgcctaacaatctcggtgattcgatcaacgggagtccattacagatttggcaatggatcgtaaacaagacggtaacaattcaagatgaaactccttatcgggtgccatcataaggttcgccttaggctagctaggggtgcaaatttcttttggtcggtaaaagagccgaatacatagaagttacagagtataggtacatgtatatgctcctaaggaatggctgttatagaatatcgtttctcatagtcatattaacgcagtctaaacactgctgtcggtgataattatacaggacttagcaaatctactcgtcatcactttcctccccttcaatcccggaaacctcgtcttctgaacaaggttggaaaaccccaggggccaaaattgatggccgcgccttgatatttcgagcacaaactcccagcagaaggtcatcatcatccgaccgactcctcgtagccccgtccagcacgaatttgtattcgtggcccatctcttctacgagggccaacagcatgttgcgcgggagatatctccccgcagttccccagaatagctttccctcctctgcctggaggattgcagccgcctggctggacttcccttggctactatgctgccagcacatgcgtagcatctggacgcagtagtggaagtacaaatatcgagcagcagggcgaaagctcgaacggaacttgagctggcggccgtccagctctccgaatgtgatagggtgatgtcgggagaccttctcatccctcctctcccagtccgggtcaataagcttgactcggtactcccgaggctcacagttgagccaacccttcacggatgctaggacatgcttctgagcttcaggaatatccggtactatagcaaatttgccagcatcgaagtatctttcaagccttctagacagaagaaggccatttcgaggcgaggaaagctcctccggtcgcgtcttaccgaagatagcatccatcgtatcctgcccattcatatatgggaacaggtgggatgcttgtatgttttcttcttcgtcaaaatcacccagaatggggcaccaaatccatggctgcgtagagtggcgggcgtcataagccttgatcatgcctgtccgaaagttggcttgttggctggtgtcgcaattcccattgcctgtgcctttgatggcaatacccatggtagaggtagtgaagagtttcataaaggatgcccttaagctccgacgaggtagcacattctccaactggctaaccctattctcgcagattttccgagtctgcgcctgggcttgaatccgttctaatatcattttggcctcgtctgtcttcttccattcttcttctaagcccccgaaactaccaagtgaaatcttacgatccacttctgacctttccaaattgattctttcaatctttacagcttgactccagagctttaagtcaaatgacccatgtgccctccatggtttccgggctatactcaaattggttgtgagttcgcgctttcttttctttagaatacgtatagtttcaggctcggtctggagggagtccattgattcattcaagaaatccataatgatggctagaatcaagtttgtgtctgcggatttgaagttgcggtttggagattcaggcttggagttcggagattcaggtttggaatttggagattcgggtttgcagcttggagattcaggctgagagcttggagtctcatgtttggagcgcgggaaggtactaagcctagtatagctgtgattgtgtcatgatgatatatggtcccgccgtttcactttatggcagattatattaacgcgctaaattagcgcttctaaataactataagaatgaacccaattctttaaccttcatggccatgcccaataaaggatgccctcaagctgcgaggtgccacattctccaactgaacggcagggtttagatgccattgcgccaactcgaaaaataattagggattgttggctctgactacctacctgccttcaaacagttgatgaagcttgacgatgaagcagttgatgaagcagttgaagcagttgatgaagcagttgatgaagtttgacgatatagttgacgatgaagttcatgagggaagcaattgataatgattcactcatttgctaaaaaggacttaattttgctaggatagtagtatggcagtaggtacctacaatttgtatgtaaaccactaataaaattatgagtaccgtctcatactagtttgacaccaaagcggtgtatagaattgtaaggcagtatcgaaagcggtaactaactagcaggtactatgactgaattttcaggcacaaggctaggccggtttgagaataggtaagaccaaggcggtaaagaaattatatgggttggcgcgatggcatcactcggcagattttcttactgggcatgaatccgttccaatatcatttaatgagtattccacaacttgtttctatccatttttattgaaataattcattctctacatgacctcaattatctacgtttgatgtttccctcttagtgcctcggccacctttctcaataacccattgtttacttttttatacgatattgggtgattagcctaggactctcacatatacttgattttcaatagggtactcggctgaaatactgtgatattgctgcccttcatacatccaagactaattggatattttatttgcctaatattgccaccgtagatacatcgatcaccacctaggaccatgatccatgatctggagttgacttgacctacttcctagttcagcaatccgtgagacctaatctgaacatcctccaaggcttctaatttctaaaatcggtactctccaagagtcttaacttagaatcaccaagatcatgtttcctttgaacgtaatgttgaggctctgctacttgtagataaaaggaagcttttctttgtcttccttgtgtcttctcatgtctcactggagtcgggaaaattccgagaatatcgagtagactatgtaaactcggacaagtaaacaaagaaaaatttacatcgtctctgttgttctgctctccaggatgcacgtgttgttctgcagacgagacgaggcacgttaccatatgatctgtcttcgcagtccttctcagccccggagatcttcttctcctttttcttttccccttctttcaaattgcctgcaatggatctcgttccaagtgcctttgtggcacgtccgttgaagattgtggttatcggtgctgggtaagggcatagtgaactcgcgataattacttctaacaaattgttttagtatttcgggaatccaattcgcacatgatacgagtatatccttgtcaggtgtcgatctcgaaatctatgacagaaatccttctctcggaggtacatggtatgagaatcggtatcccgggtacgattatattcctacgagctttataatcagatgaatgagttcactaattgccggtgatagatgcacatgcgacgtgccttcccacacataccagttcaattgggcgccaaatccatcatggtcgtcgctttatcctccagctcccgagattcaccaatacctcgaggatgtggtcgacaggcacaatctccgccattttatgaccttcaacaccaaatgtgtcttggcgcggtggaacgaagactcctcgaaatggaaagttgttctctgcaacgtggattccggtgaagaaacgaccatatttgctgatgtctttgtctatgctgtcgggcggttgaacaactacaagttccccaagattgcgggccaggaaatctttcaaggagttcaagtacacactgcaaactggccagctgatatgactgtcaaagacaagcgggtgatcgtgattgggaatggtgcaagcgctgttcaatgcgtggcagctttgcagccaggtgagtcgcaaagtccccccgaagacacacacaccacgctaactgggctcaagttgtttcgcaaataatcaacattgcgcgaggcccaacgtggattcttccacatgcattagcagaagatggcatcgtccagcgcgaatgtgagtatgaaagcaaaggacgagcgacagaagggctgatccatatctagactcaaccgaacagaaacaagcgctccaggcttgccctatgcgctactatgactttcgcatcgcattagagcagagacttgccggaactttcatgggactctggagaggaaccagatctcaagctaactttacatcactggcaaattcattcatggagtccaagatcacaagccccgatcttttaaacgcactcctgccagaattcgaagccggctgccgtcgcttcacgcccggtggtcactacctggatgcgttacaaaagccaaatgccgtgtacgtgcgtgactcaatcaataagctgaccgagaatagccttatcactgaatcgggaggagagtacaagtgcgacatattggtatacgccaccggattcgagccctatcagccacggttcccagtcactggccgtgatggacgatcgctgagtgaagactggaatcgtgagggaccgtgcgagagttacatggctgcgatggttgcggagtttcctaacttcttcggtaagaatctgaatgctttttgttgatgactgtgcttaaatatctcggacagtcttcaaccccccaatttgccctgtgaatggatccgccatccccggtatcgagagagcaagcgactacatgattcggatcatatcccgactccagacagacagactgcgatccgtgtctgtgacccagggagctcagcgtgcattcaaccaatgggttcagtcgagaatgcctcacatggtctggtcaggaccgtgcaaatcatggtgtaagtaaatatctctatcccttgttcctagatttgtagatttactcatcttgtgatacagacaagaacgataatggaaaggtggttgttccctggcccggcactgtcctccactactatgcggcaaccgaaattatccgctgggaagacttcgatctagtgtacgagaaccccgatgagaaatatgcgagtttcggcaatggtgtgactgttgatggatttgtgcccgatcatttcccttgggttcatccacccactgagtttcaaaagccggaaaggaatgcggagccaacttctcaggttcttgcaccgcaaagcagtatgttgtatcgagttacaagccagattttacagttgctgggggcatggccgcatcctggtgaaccaccagtcaagagttgaggaatgttactatgctagctagcttttgtgaaaaatccaatatgttttcgggttaaacgatctaagtgtatgcttagtattaaaacctgaattcgtgctacacttctaaataattataaagttacgctaggtctagtcgtataaaatgcatgaattgactctattttatagatcttatatccaatgatctagaccaatcagcatgaaggtggatatatcagtaattccatcggctataacgcctttacgcttgttatccccggcagatgcgcttagattattaatgagctcttgaccgatttatttaaatagtctaaaggagtttcgttctgtttcttctttgttccactaatcataattcattgtgaaacaattggtgagttcccttgtcctgatgatatgacgtcatattcaatgtgatattcaatgcaaaccaacaagaataaataaacaattccaactaatgataatctctgtattagaactcatatacatacgcccgcaatatcacaatggctgataataagatggaatatgtccggtacagacccctgtcccacacattccagtcgaatgagatgctgatatcaaacaaacagcctcggaaactcaggtctcaagatctccaagatcatccttgggacaatgggctatggcagcaagcaatggcaagactgggtccttaatgaggaagactctctgcccctgatcgaacatgcctacaagcagggcatcaacacctgggacacggtaattgaaaacatcagaatatcttcgagaaaaccaccgaataagccactaatattcaccgtgtaggcggacatctactctcacggcaaatccgaggaaatcgtcggcaaagccctgaagaagtacaacatccctcgcaaccgcgtggtaattctaaccaagtgcttcttcggcgttgacgacgagggcaagttcccacccatcgccgcatccggcaaaaacgacggtcccttcgtcaaccgcaccggcttatcgcgcaagcatatcttcgacgccgtcgacgccagcgtggaacgtctaggcacgtacatcgatgtgctgcagatccaccgattggaccgtgatactccgcgcgaggagatcatgaaggcgctgaacgacgttgtcgagagcgggaaggttcggtacatcggtgctagttcggtaagtccatcctaccttccttccttctgttcttattctcccctttcgttccttccgttttatgatccaattgatctccactaacccataacaataacagatggcagcatgggaattccaatccctgcaaaatatcgctgagcgcaacggctggcacaaattcatcagcatgcagaacttccacaacctcctcttccgcgaggaagagcgcgagatgatcccctactgccgagactccggcgtcggcattatcccgtggtcaccgattgcccgtggtgcgctggcgcggccttggggctcgcgctcgacggtgcgcgagaacaccgacggcgcgctgaagatggttgtccgcagtcgcgagtcggaggcggataaggctatcattgatcgggttgaggaacttgctaagaaaaagggcgtgagcatggctcagattgctattgcttggtctttgacgcacccgggtgagaatccgattcttggtctgcatagtgttgagcggattgatgaggcggttgctgctattaaggtccggctgtctccggaggagattaagtatttggaggagccgtatgttcctaaggctgtttctgctcttgagcggtagggatgtgaagggaatatatacggagttttagaaggtctgtaaatactgtgaataccatacaatttagaggcatcttgatattctacaataacagcactgagcttttgatgttgaatggtacctaggcatatagcagttctacgaggcattagacatctcttttatctacgatatacggagtatgcaaagagaaatatcctccgtatatgtcagatctaggcatcaagatattctgtagtacttcggttgtttcggaagtattctccctttctgagatcacatttcggcacccctacggggtaagcatccactcgaacacccactcgaaacatccactggctcagccacacatttccgacaaatcaccctttacgaagtgggaagtatacacctcataagccaccaccttggcaaaggctagctggtattcatcatatttggacaagcgcatgcagatcgcattattattaccttggcgaacgctaattcgatcgagatagtagataacggcgtggcttagcgcccaacacaggatgatccctccccgatcttctctagcgctttatgacctgggagatgcagatggacgttactccgaggacgccggtctcatgtattgtagcaagaggataggctgtaacgaattgacagaaaacagaactaatacatccttaacttgggttcctaatgagattagcaagatattttgagtctatacttaaaatagaaaggcttgtggaattcacagtgagtgatgggtattatattcatatgtagcgtgattggatagatgagtagcaatgtgcacaagtgagataagcatacatattttgacctcatgatatgaagatatgctaagaagtaggtagaaaaagagaagatagagggttacgcaaaaagcaaaggatgctagatgctagttggaatgtgtgtgagagagggagagagggagggagagagggaactagaagaaaaacaaaccggcaaggattcgtaccagacgaaccacactgctacgtatgaacgcccaactgatgccaattgagatgagactcgaaagaggggctatgatgatgtctacatgtagactagccacaaatatgatgcaggggtatagatggtgatgggaaatggaaaggtcaatgagtatcgtgttttcggtggaaaatgccaaagaatgtactcaggcggcggctgagtttgcttttggtcgagtcgacagctccagggagcggagcatccgacttcttcttgcgggtgctattatggtgcatgaggtgggaatttgaggcaggcggatctcgatctggccgcggttttgatcgaacggtttctctttccggctgggctttttcgggggacttcgctctaggataaacagctcgagaagaatcttccacctcagcggacggtgggcgaggagaagggggacgggagacaacgatatcgcggccattctcgccggaggtagtgaacatgctgtgtcggttcagacgagtactcagcccagaagcggatcgtcgtttcgctcgatccatgaatgcagcaccggtggagttggagcgcctggacaaactacctccatccataatttgggaacggcggacactggaaactgacaagcagcgcttgccatcttcagcgacattcgggaaagagtcggtttcattcttggaggtcgtcggggatgcatacttggcggatgtcggagacgtactcgactttgcgggcgaagacaccgggtcactgtagcggaaattgtctgaccacccctcacggaaggcaacccagatgccggtgacgacaatcaaagttcgtagtccatcgtcaagaatgactgagctgccatcgaggggagtctcgtccgaagcatcactcacgaccgacattcctgagcttggagtcgtggggccggtgccagaccgaacagccgtggaatattcattattgacttctaactgatttcgagtcatggacgcgagcacgggatgtcggcgggtggtaggatcgatgacactgaaggtgaagcgcttgccgtcctcgcgcgattgtgtcgctgtgggcatagtcatccggcgattcctcccaccacgcaaagcccaccgcacgacttgcacgccgctatctgtctgagcgacaaactcgtaagacccgcttgggagaggcgcggcctcccagatcggcccgaagttcaagcatatctccgcctttccattcatgcgagcatctccttgatatttttgacagacagtagcgacgacttcgcgatgatcttcgtcctcatcctccgagctgacacgtttctcaggaatgctgtccaccgcccggtcgtattgttcactcaacaccacgatgaggtcatatggacccaatccgtttcttgttcgatagatggctgggaatttgcgggccagtagcgggaggtaagacgtcgatggcagaatgtccacgactggtaggggccgaggggtttgcgacacctgttgcagttgtaggaggagtttaggacggaatctgaatcgcttgtggcgggcatgagcggcggggtgggcgaattgatacaatgttttgggtcgagacttccgacctgtgtttgaacgggcaactcgaggcctggcgaccatggctgattctctggagggttcgcccgagtccgaggctgactcaatcgaatccatcgtcatagcggatacaaggcccggacaatcagtagaaccatcaggcagcctaggagggctgtaaaaggagttcaacaatggtagagcagacagtaagaacgcaggcgagtatgtagtacacgtggaaggcttggcttctggtttcttaggttcattggcatgggcagctgcggcatccgctgtgaggccaagattcaacagcatgtctaagccctagcagagccacattggaatgagagaaccagatctctatggaatttcaccccgatccgatgtactagtcataaacgggccgtattcaaacgcgtcagctgcgggggtgggaagttcagccccggagctatgtgtggggaagggcttatgacgaggtaaaatggaacagatgtagagaccagaatgtgcaagagaaagtatatgcaagggcagttaaaagatttcaagaggaggaatgttactgcaggagcaataaaggacaaaagatgctcagtctgaatggggcggtcagccttatgaagctatgtaagaaaaaaaaaaagaaaaaaagaccgaaaggaactagtcaatagaaatgtcgtagtggaacgccatttagttgcacaaaatcccagaattgaccccccagtgtgtaatttatgtttaataaacaaattataactagtctatatcaaagtactcctccgtactagcagaaatcgcagtacggagtagtttaatgcacaaaaccggaagttcagctcctgtcagcgggctcggtcatatacggcctccgactcaccggattccgtggcgatcatcaatccctacttagtatccagtcaggttctttttggcctaagatcgggatggtctgcccctcttggcaagccccatctcattgaaaaatcggcagattggtccgaggctggttacctcatgagcccatactagggagagctccatatatttttctaggcatggtgggactatcacgttcagaagttgaattttcttggggatgactttgagggatttcatatctacggagtatgaaatccgttgatgacccgttctcaatttaaccttggaatcgggcaaattgttgtggcgcaaagtccgatgaactagcgcttatgctggtagctcagccttgggaataacggaaattcttggcagattgctatttacgatatgtacggagcacgacgggtagctacgtcgtttattgattctgtgttgatcatttgtttcacatatctaaaatgcccgcaagatgaaatttgcgagatgtccccaaatcgccacgggaatagagtccatacctcgctgtgtctagcaggttctcgcaaggacgtctcttttcatcaaaccttgacgcccggtggatcggatgactaattatgcacagttatgcagccgaatatttcagcgtccacctcttgggaaggtcgtaaggttacctcggtagatcggtcgaccacaacccggtgaatcgtgaggtaaacatcccgaaatctagaccgctaggcatcccccattggaagaactcccgaggtctcatttaagtcacccgcttagtggctggggtcactggaaacttcttatggctccagttcaacctaccgcaaggccaccgccgttgtttgccacactgctacgattggacaacccgattcgaagtttgacgctagcattttgggcatggaaggttctgttgtatatcgttgttgttgcctgtccaggatcaggttatgatacctccacctccttgatctcatatgctgccaatccaacggcccagtccgagtctctctccggaccccttagatttgccagatgggacagtatctacttcctagatattgccgaaaagggatacctgtacgagcaagaatgggcttttggctggggctacactaagcttctgtctatttttgttgcaggtacacaattccatctagcactctagcatcttctcacactaatacaggaaataggtattcgtctctctggcggagatgctggacccggtagcactgccatggtgggagtggttctctcccatgtcgcccattatttgtccgtattggcgctctatcgtctgtcggccaatatctttggccatgcgactgccacccaacacctcatttgtttcctatctgcggctctccacatcatctcgccagcgggcgcttttctttccgcgccctatggagagtcgatagtctcttttctcaacataactggcttttacctctattcatcgtctctcattgccgagcgcaatggggcaactcgtctgcgagatattcgggtcctcacatccgcggttctattcgcggttggcaccatggtccgcagtaatggggttctcagcgggttcctatttgcttatgatgcggcagttctgggctggaagatcttgactaaaggacctacactgcacaccactgttcgacttgcagtggtcattgtcggtggctgtattgtaggatccgggatagtcattcctcaaatcctagcctaccgcatgtactgcatgtccgagggcgatcttcggccatggtgtgagtggactttgcctagcatctacggctgggtccaaaatcattactggtaagcagtaattcgtgtccgaataccaccgtcctcactcttactgactgcaataggaatgtgggattcctgcgatattggaccgtctccaatatacctcttttcctgttggcggcgcccatgttggccattctatgccgatctacgttgtgggcattacaaagtccctcttcctcctcgactagcccgggctcaatgctcgctcgcttggcggttccccagggtttgctggctgtcatggcattcaccagctaccatgtccagatcatcaaccgcatatcgtcagggtatcccttatggtattggtatttggttaccagtgcggtagatctcagttcaagcacacccaagcaaagccggacccttgtagccgctgtgtatagcatggtggcctatgcgttgatccagggtgttcttttcggttctttcctacccccggcatgaaaaagaatgaccagcagggatgacccggctcaatattggcccgagtcacctgctgtatatattgatatgtgatttaagttagaaaacacggcctagactgctttgaatgaccacaaatgccgcctcccgagtgttggttgggcaaaatgcttgcgtaaggtgcctgtctgcctaaacaggggtggaagccgcagtcgcccaccaactgaactattataaattggaaaggaagaggggaaagaaacgaatctcacgcatcttttcaaacaactatcaaaaacaagtcctactatatctttagtgtatctttccacgcggctcactctgcagggcccaagcttcgttacgtataattatgtcatcacaacctcgactctctcccgtttgacctcttgaccttcaccatttaggcatctcaagaagaagagaagaatcggaggccgaaatcttgagctgctcaattaccaaaagaaatacgagcccgtcatatttcccctcgcttgccaagagaaaaagtaccccatgcgaacacagccgtgtgaaatacaatagtattcggttccaaatcccgcgcttttcggagtagcagcttcagagtttcattaaaagtacgatttccttcgaaacttcttctattattgatagggcgccggaaaaaaagatacccttgtgaaatatcgacgttgctgacgtattgcttgcttctagagctcacccgacagcaacggcaactcttccctgacctccatacccacctcgtgtcgaccattcccttccctatcccccatccgacgatggaagcctctgttcccaaggcggttctcacatccgacaatttccatcatgcacaagagctctcccgggcgacctcgcccggtggtgagcccgtcgccgtgaatagcgaaggcgaaccgatagcccgcgtgcgcccccgtacctatccatacttcaaatacctcccataccacctcgaggatgagagtgagcggaatcaaaatctgcgagagattttgaaccagctctatattgcagtggaggccggtgacttcaatcccggagccgtgcactggacacgcgagctacgcggatggctgtcgctcaagttcgatccaaccaaggcgcagcgaatcagccttgtaaaattgtattttgagcttgcgcttgctcctgggattgacccgtcggtcgctgagcggtttgcgagcatgttcatgcttctcacgaagtgagatgggttctcagtgttagttgcgaaagtaatgcggctgctaacacatcatttaggcgcaagcattatctcaaaccagtccaagatctcgtcttagattggaagcctctatacaaggagctcaaggctttcgtcctccccaccgagtccggcctcgttcactcgaccaacttgaagcgcaatgttaagaccttgaccaagctttgcgcatttgctcaattattcattgacccgtgtgagctccccgctatgcttgaggagttcttacctcattataccacatcattctcagaaggtgccttcgttgtcgccgggctcattaatttgttgctcccgacatccccggctcccgaatcgcgagtcgatctcctaccgcagagctatctgcctacacatttccatctgtggtcattggtcggtcggtcaaaaacatttgacacaacatatctggactatctttcccgattggccagagattctctgccggctgctcacattccattctccgagcatggtatcttcacaaaggaacagtccgctctccttttcactgcgatattgaggttgttggagatccccgtcgggcaatccacttccccgtacagtgccttggtggatatttcgtctggtttgggtatcatgcttgatcgagatgggcggaagcaccctgttgctcatcatattgcccggtggattgtgatgtcgctttcacccgcttgtgtagatgccgaggtttcagttctcacacagctggaaggtctaatccaagctgtcgagacgttcttccacccttcaaactcaggtcattggactaagaccctatcccaactggtttattacctgactgatttcttcgtcatgcgttggaatcgcgaacaaagtggtgagctggaagtcccgcctgagcgacgattgaatgaggctctgaagaagcggtttgtcttgtgcatccgtgacgtagtcttcatgggcatatatgctaagagcggcactgcaattaccttctccctgtcaaccttgcaaggtctggcctacttagaaccgcatctcatcctacccggtgctttgcagagaatctaccctgcgattcaaggtcttgtcgaagtacaccggaccgcatcttctcttcgggctatgacatcgctgtctcgtgtcatttcgcgtaccaagggttatcgttgtcatatgacaactttgttgggtctaacactacctggaattgacgcgaatgatcttgaaaaatcgcttcatgctctatcattcatccaatcggcctgttacaatattccaatggtcgacttgacccaagggcgagaggatatcaactgcaacatgcttgccatgcaatggatctcaggtgaaatggagaggatggaagagcaagggtccgatgtacagcttggttatgatacagagttagatgacgagaccgaggaattgatcttgcgctcttcgacatgtggtttcggagacttcacgatagctttcctaggtcgtgtcttcacactcttggagaatctgccggacgtatccagggttcgaaacggttcacccgaagagaatatcgtgaacactcttcccgccacgttcatgcctttgctcgcttctctctctccggagtattacgatatcgccttggggaagattgtggatttcgtgtccaaccatgtcatccaccaggctcgtgatgcaatggctttcatctgcaacgccctatgcaaagtcaacccagagaaggccctcaagcgtttcatccctgtcttgacttcagctatccgcactgagatcgaagataatggtgctggatcaacccgaaccacaggaacagatgttttgcctcgtgatcgaagtctggtatggaatgtcagtatgctgagcatgtgcgtggtgcatgttggcagcgccgtcattactcaccgccaagaactgtttgacattgcagtctatatgcaacagaactgccgtggcattcctacagttcatatttccaacttcattcaccaccttttgctcaacctgactgggacttatactaatgatttctcactctacgagccttcagtcaaagcgaacggcatcgagccgaagctctggagttaccaagccgatgtgaacaacctcaccatcaattggcatgtgccgacgcaccaggaaattgagtttgctgtcgacgtgttcaaaatccaaacagaaacggctttgaagtccctatctgcgctgactcatgagacatcaaccgttaagcgtgatggaagcggcaaggactggtcagacgaggtcactcgcaacctcgtactcctgcggctcgtgttatctggagtttctgtcctctttgatcccaaagccgcatcaaccacaacacaaggaccctcgaacggtacctccggggatgtcgagatgaaggatgattcgggtgtttctaatgaccatgagaatgatgaagatgctgtcctggacagctctgatgatgctataatcagacaggctttcacatatccaactgggtacgccctcaaagagggagacccattatacactaccatccatgaactccgtgaacgaactggctgggtgttgcatgatgtacaccggttcttgagcgataagcaagaggatgatgttccttgctttggcgctttgtactctgcctttagatcgtggtttgttgatgtgggcattgaaaggtccgctcatgtactcgatcgagtgactcgcctcttagccgcggacattcatccttacaagatgagtggtatgcgaaaagattaccccagacccttgcttgtgcgcagagccaacgtgtatcacctccaacgcctacgacacaacgcttctccccgtccgcgatctaagcttgatgaaattcttcttcttgatattgccgaatcttgtgtctcgctctacacagaaacgcgccgcaatgctcaaaacgcaggcgaatcggcactaaaagcggtctatggcggcagactactcgtcattcctcctctgctcacggctctgcagaggggtgtcaaggaaaatgatcatgcacgcattaaaggagcactctactcgctacttctgagcagtgtagccaagactgtcgggcggcattggaagtatgcgcctgccgtggtcagaacatttattgatgccagcgccgttgataagccttctgtccagaagatttgctccaccgcagtcttccaggtcatggattacggtcgcgcgatggagcgaatggctatcctagatcaagagattgtagaggcaattgctcctattgaagatgtcagcaagcagatcgagaaaaagcgcgcagttgtcaacagcaagcgtgttgctatcgagaagaagaaagccgacctttccgaggagctggtcaacctggcgcgggtgtcccattggaagattgccagtcgcgctgcaactatcgttatcactatgggtctccgctttgactatatcgccagcgataatttgatcgaactgatgacactcgggtctattgacgaccaccctggcttgcgaggcatgtactcccaggctctcatagcgctgttcacgatgattgatgtgcgggccatctgcacgcacgagtacaagaactatattcttggccatcagcgtttcccgtccaagatcaaggttgcaacaaaaccctttgagaaaggatacactgaacaatacctttctagctttgcaaagcctgaggcagagtactacgttgatcacgacttcccgggctggcttgtgtggggcaagactatgccggcttacaagtctaatgtagcacgggatatcgagtatgacgatgttgaatggaaggttcgcaccaagatgggcaagttgtttactcgcgagtggttctccaaattcttcatgtacttgaagcaagagccacgggacccatctgctgacaagttccgcatgtcctgtgctatgatgcttctctacgcattcgagctcatgatccgagatggacttacagtcgtctcgtttgaggaaatccaagaggagattaaggacgtctttggagacggcagtgataagcaccaacatcgtgccacggctgaaatcctcggagctttgatatcttcggtgacggatacaggcgtggagaagcggactatggtctgggaatatgcattccctattgtacgaaaggttttcaccgatggccttactccagagaactctggctattggacaacattccttcacatgatccttcaatgtcgtgatccccgccgcgcttggccgttggtcgattggttgtccagcttccgtcttgatatgtcgaccaacgcagcattcaaggaaagctctaagatcaacctcctgcatcaatgtatcattgattccggttggcactaccagctcgagaagcccattgtgaaggatttccttgcgcatttggaccacccgtacaagggcgtccgtgaggcaatgggtcaaactcttgcaacgatttatcgcacgagataccacgagtcgtaccctgatgttcagcatcttctcgaggcccagaaatcatcctcttctgttggcgcatacccctatccgcctactaaagactttaccaaggtgattcatggggttttcagtcgaatcgaggaatggcggaaggccagagctcctggccaacagacaccctcatcctacacctcgggtagcaaaactgttcttctttggttggactcgaccttgtcttctcatgagtgtacccagcttgtcccatttttccctgatgtcttcaccgcgcagctcctgcacatgatggatgtgaaggaggacccagagcttcaatccctcgcataccacgttttccgtcacctccctaacattccgtaccctgcggagaaaaactccgaattcgttcaatctctcatccgcatcggacagtcatccccgtcatggcaccagcggctgcgtattatgatcaacatccaaatcatctacttccgccgcctgttcctgctcgaccccgcagaccgcgacaagctcttcgagtgtatcgcctccatgctcgaagacccccagcacgaagtccgtgctggcgcctcggccacattatccggcatggttcgatgctcgcccgtcttcctgcgggaaaagatggtcagtcgcttccatgaacgcttcacgaagcttctggcagacaaccccctccctaagaaaccgaagaacttccgctctggaatcgcctcctccgccgtctcatccggcgctggaacccccacccccgagcacaaccgcttgattatcattcgccatggtgctgtgctgggtcttggcgctttgatccaggccttcccttacaacagtcctccgcctcactggatgcccgaggcactgactacgctaagtatccgcgcggccaacgatcccggcatcgttggttcgagcgtgaagtcgattatcagcgagtttaagaagactagacaggatacttggcatattgatgcaaaggttcgtacttatgatataggttcaatcctcgaagcaaacggctaacgattttcaatataggctttcacctcggatcagctagaggacttgtcaggtgttctatggaagagctactttgcgtaaatggaacttgggtatttaattttcgtgggtttctttggattggcggcgggtttcctaatgacaatgtgattaatggccgttcgtacatattccaagctctctgatagggtggtgtatctttagtacggaaatgaaagacttgtgctatgcttatttgctctttgtatagatactctgggtgacctattgtgtataaaggctataattcaccgtgatacgcgtcttttctaataagcccaagaattgagtgtgacaagtgaaagaacaagccaagcaatgcttcatattcaacgagcagccatatcaggaaatgagagtgacatccgctcctcaatgtgagactttggaagttctcctaggatgttggtccctttcaatggtatatggtatagctccgagacctaatactatttacgaaggacttgtatctcccacggcgtgatacattgtatgacaatcacacaggtcatatattagcgacatgattattccaagagatatccaacatatagctattaggcttgtacaacttcagacagaatactattgtgtctatctatcacgttggattctagtgtggcattacccaaatcttaatcgaagatgcagtcaacaccgcgtagtgatgacatcgtaggaccaaacccttccagtcattacggtcaaacagatccgttggttcctttcactgatatatgcttgttcatacagtctgattgctcacctctgcacttccctttccatcttaccacgcacaccacgcacatcccgtggctttcagagccaaagaatgcaattatccgccctgtaacttgactgccactcattatgaaactcctcaagagaaacaggacgccatctccgttttacattaagtcttctgtctctccacgggatcgccggtggatctggttgcgctggctggggtatcttacctgtctggtcgccgttgtccaaactagctcatatctcttcgggtacccggagacagacataatccagactgtctatgcttcgttacagggccccggggtccttcggcctggtcagtatcatgggaatgttggtttgtgggacaagatagcaggcgaccactcacctgagccagatgcgttcggcatggcacatgatcggaggtttgtacctatcccaagcagcttatgcgtgagttgatacaagattatgctaacaatcaacccttgcagagacaagcgattctatcagggcggtaccctaaccctaactagtatcgagtctgtcaacgcctcgcacccagtcccacttgtctacgatccatacccagcatacaacagccgagaatggaagaagcgattctatggaaggttccagccctgccttggccccaggggccgtaatctcaaccggaggtctgcagaagatatgatgcaagtctacaagggtcaacaagccgggttcccagcagcgcgattcggatcgtacgaggcattgggcctagacgaaaatgtttgcacagaccgttactcccgctacggggcatatggttacgatgacgatggcgaggacgagataccgggcttcacgcgccctccctcaattccgtggtgcgaggttgattggcacagactgcaaaacctctgtctagaaagaaacgcagacagatacgagtccattgcgaccgccaattcttcaaatcagagtccactagcctttgaccttccccaggattctctcaaatcacgggagtcacctgcaggtgcttcgggtgtgaagcagtaccatcctcgctcggctgtgctgattcgggcttggaatgggctcaattggaagcctcaccatcgtgaataccttcgggccttgattatggaactttctctgcattctggtggggaatatcagatctatctactgtgtcatgtcaaggaggacgagatgcccattttctctgacatcaagaccatcaaccggctccggaatgccatcccgaaggaatttcggaatatggctctgttcttcaataacaaactcttagaggcttggtatcccaagatcgaagagcacaggtgaattaatcatttcccattgaccgatgttaaagacacccttactaacagcacttacagtccccaactccaacaccaccaacctctgcaaatattctcccagctgtacccacacttcgactactactggcagctagaaatggatggtcgccacacaggacacatctaccaattcctagacaaagcagtttcattcgcacgccaacaaccccgcaaatacctctgggaacgcaacgcctacttctacacccccggcgcacacggcaactggagcgaattcaaacaaatggtacacgacagcctatctgacaggtccaaccttacaatctggggcccagtatccggcaccgggatcagaccaatgggtccagtcccaccagtgccatccccagactatgacaattacacctggggtgtcggcgaagaagcagacttcataaccttcctgccaacattcaacccgcaaggcacgcaatggacattccccgacaaggtctggaacttcagatacggccagtacacgccgcgccgcgccgcggtcatcaccatgggccggtactccaagcgtctactcgatctgattcacaacgcgcaggcgacgaagggtctcggacttgcgtcggaaatgacaggtgtgtcatgggctctgttccacggcctcaaggctgtgcatgttcctcaccctatctatgcggatggccagtggacgccgaaagaactcgcgcgcatctacaaccccggtccaccggagaatgttaatggggctccggatagtatctggaatttcgatcatatgtttgaccatatcatgtaccggctgtcgtatatgtttacgacgcatagtgcggaagatttgtacaggcgttggctggggtacaggactgcggagcacgagggcgggaaaacagtgagtatatatattcgtctgctgttttgcttctttggaattagggagtgatttactgactcgtcttttctagatatccgaggatcgctacggtcgacattgtttcccgtctatgtttcttcatacgatcaagaacacggctccacaaatgggcccagacagggctgttccatgattcatatccatttacggtggttgacttgttgacatctcaaaattcttatgctttgacttatcggcgttgatgtagaaggcacatacgacttgcttcactgtctaatttagagaatctgaagtcatttgatatcatttgcaaattaaggaatcgcccattgttgcagttaccagactacgaagagatatctgccagggtagataatggttgcgccatgttaaacaaatcgtagaattgcactaaaaccgaactcttcatcgctgtatacaaaaaaggagaagcagtaaaggccaccaaaacaggccacgacgcaaaaaattaggcaacttatgtacgtgactggaataagctgatgaaccaaaagcaatttaccgttcatatgctctgtgagttttgataatccccgtcccaaaaatgaaagtagtccatctcatgacatcattaagaaccccggggggatgcctcttcgtctctatcccctggaattatacttctcgttgaaagcattgaccgctggaaagggtatttggttagcaaatgacattgtttagcatgatcagagtaactacttaccgacagcaatctgtctatagagccagttccgcgagctttcatcttggacaggaatgaaaggtccgttggcaccacccttgagcgtgatactcattcccgtgcgctccttggaaatggtctggatatccgtgaggcggatatcccactcagtatacagcttcttcgtgcgcaccagcatgatacgtgcgtacgtcaacaagaccagcatgtctcggccaggcagctctaggtgggcaatgtagtcttcgtcgaagtatttgccgtcgtccgtggtcttcagccagaactgtccgagagcttcgcgctgcgagtacgggcgcacaatgccatcggtgccaataaagcgggtgagtcgaacacggtcgagaccttcagcatcgaaaacagtagtggtgttgcgaacaccttctgccaaatctagtaggggattgttagtgatgaatactagagaaaggggatggttcaacttactagaggcaagatcgaatgcaccgatcgctggcttggtagccaatccaaggacaccctttccaacacctttgaagaatccttggataccttctttctccgcaccttgcagtggatgacgtgccaagccaccgataccgcttgcaagactagttgcaaaggcactgccaccagccgtgattccatacagcgcgtgcttggggcggttgcgcaccttggacattcggcgctggttttggaactccttatcaagtgtagcggcggcgagacccttggacatacttcccgtaagcttggccatactgtccgagaatccgaagatggacttcttcatgaagctggtagcaccctttgcgataccaagacccagctcttggggacggtcggtcatgaccaaaccctgatatggctcatagaagatagcggcgacaccagagctgacattgttgaacaaaccgacagggttgcctaggaagtcggccgaaccgagaatgatatggatctggcccaggaattcttgggtatagtgtgcacggatattggcgaccaggctggggaaagagacacgggcattctcgagcatcagagcattgagtcggactggtgcatcattgacattacccatcgacattgtcatgacgttgacaaagaacatcaacgggttggagggctgcatagtatcttccacattgacgcgctcggtgcgcatgaatgaaatatccatctgcattggctggagatgcaagagctcgaagtacacatcctgaccattgtcttcttgtcgcggctctggaatgttgaggtcttcatcgcacagtttgccctcttgctcctcggcccacgaagcacccggaatcttgacaaagtcaagcatggcaaggacgaagtcctcatccagttcaagtgtcatttgctgcaatagcaaggtcgcgtacttgatatacagaacaccatacgagtcgtccttaacccgtgtaaccattgcatggaagatcgggtgtgcttccatctccttgccagtcttcggaacgacactggggtaaagcaagatggggaaaataccaccgtagagctggttgtcgatctggatccatttgatagttgcgttcagagtctggtacaacctcgattccctgaacttgaactcaatctcgcggaatgtgagatacagcagctctttcaggttctggttgatcaatgaaattccaatgccacctaggcgaagttgggccttgaagttgacgtccgaattcatttccttgatctcgaacccagccgtggagccgacctgggaggattgtctactttgttgcttgtacatactcttcgacggtttgaagttggatagcacaagagtctgggtggggccatcagcagcaatgttgatgtcaatgatcttctggtgttcgccaggctgcgaagctggaatccgcattgggatcaggtttcctatctcggcaagtttgatatggcgctctttgccctggcaggtcaacacgagcgacttgttcttcgtcgccgggtagtcccatgcatacggcatgatgctccgcgcgggaatccgataccggatcggcctccagccgctagtctggtcttcttcatcatcatcttccacatttggattggcttggtagaaaatgaactccatatcgctttcgttacgcatggagaacggccaattgcgttgctcaaggctgaagtgcaagaaaagagttgctccttccatgatgatatcaatcttgatcaacttctgccgctggttcgccttggccaatttcacgtgcacggttcccacatcggcgatgttgaacggggaagaccattggttgttgacgcccgggaagcagaggcacagctgtttctcttgaacttgacgaaggaaatgaagcggtaccaactgcccgtttttgacctggagtacgttggaggagcctggctcgcgagccagaagatcttcgttgagcttgctctttaggatgaaccgtggagcaagagtgaccaccttggtcatcttgtacttgccctcgccttcagcaacagacactccggagtggaactcagatcggccttggcgatctgggaagatgacctcaaaggtactaccaatagcctcgaaactctgcggcttactccatgcagaatcgctgaccttcaagatagatcggttgctttggtcctcgttggcataagagtacatgtatggaagtgcgcggccctcgtctcttggatcggctctgagtccttgaccagcggcatttctcgcagattggaggaatgctttgctttgaatgtccataggaaggccagtcttgttcaagacaaggtatgggctgtacacagaaaccttgaaagcaccaccactgttaggaatgttgaagtaatgaagctgtaacctcagttgaagacctcgctcatccttaagagtcaaggtatgctctctgcggtagtcttgggcattgccgttgacaatagcaaattcgctctggcggaagaccgaatcttgcagatcaatgctgagcaacagcaagtgggaaagctccacgacgtgaaccgggctgacgccacccttcctcaagaagttcgtccaatccttcttggtgttcttgtcgtagatgcggtacttgaaatcgtagggcaacaggttctgaatctccacgggagcgaagattcggatcctcatgtagggatacacgctcgtaagcgaatccttgctatcaaacgttgcgttgacttggaaatagaaaggaggagcctgctgtccattttcgctaatgcacttaaccgtgcgtgtaggtcgcttgatgaggtccttccagaacaatcgctcatctgaccagtcatatccgaagccctgatcgggacgaacaacgatagaatggagatatgctgatccaacgggtgccggtcgtgcgtccccaggcaaaatcttctcaatcttcagcaagtggccttctccggggctgaaaatgcccatttccacgggaatttgggtattgttctcgataagaagtggcgaacggaatgtgatgtacttgacattatcgggtcccagtttgacttccacgagtagccggtgaagaacactttgttgcttcggcttcagagcgtagataacctcgccctcacgcacgacaggaatgcggctgatactatcgaagccactgccttccagtttgacaccaaccactccgccgtggccttctggggtcagcgattcacggatagcggtggaatcttcaaatcgccatggggcttcttcgccgtcggtaagtttcgccgccgggccttccactccttcgctgacatcggcccaaacactgaggtcaaacccagtgtagttgcggattctgtatggggcatcagcgcctcttggcttggcgaggacatcctgatcagtagaaaggaactggaaggatttggatgcgagtgcaatcgtggcggatgttatagtaagctccattgtcttgtgcgaatacacatcgaaagagaaaacatccgggttggtctccttggccatgtggaatcctagctgccagggctcaatcaacggctcccaggccgacttcgagaagttatacacattcatgaacgtttcgaagttggtatcggcattcagtgtcgatgaccagtcgcgtacatcgatgttgaatttcttgacgctccaatcgaccaaaggtagatcgtgtagatcaccaataagaatgactctaactccgtcgatcttggcagacatctcttcgcgcttgaggacaactgaactttgtggcgcagttgtccgatccaggtttccagctccttgactcgggcggttggatctcttaacaacggcagaggatgtcttgctagaagaacgccctctggttgtcttcgtgtccgtaattttcttcgcctctccgctctcagtctgctgggcattctgggtcatttcagaggccttgttgacaatctggattgccatcagaatatcacgcagagacaagcgaagaaccaaaggctcaaggtgcacctcaatggaggtcaaagcagatcccttatcttgcgatcggctatcaatggacatttcaagagtgaaatcatccagaatgcggagtcgagacgtctcaaacttatccatgcggcacaggaacatgcccactttttgaatctgcagagtcgacacattttggtgggagatgagaacttccttggtaccaaggacgatagcttcagagtgaggaatggcagggttggccaccataatcacctgagcgtcgacaagattgacccggaatgaaacggtcatagccgctgctgtggcatcgcccgaagaagcctcggttatagccttgttggaacttacaatagtatcggaccctgactcagactcctcgggtgattcgctctcatcctgcacctctattggtccttcagaggcaaatgcagactggctgaatgactgtaaagcagacagataatctaaagcaaacataatgcgagggctatcaatagtcagcatcgcaatgaggtgcttctctggtcctccagacatggacacgctagccatgaactgctgttggacatcgttgttgatcaaagacatgatgtttctaaacttgttcgagtcctgcttgcgactatcgcggatggagaatgaatgaatgaggagctccgactccaatgagccatctgtcaacatacgcagcttgactcgagtatcattgagagagaacttggacagactggagtcctctaggcggccgacgggctggtcgtcgtttgccaggataagctccaggccgacactgtcgaccttaaagatcatatcaagtcgtacccaagtctctctgttttcgtcatcagggaatgctcctcccgagccattttgtgcttggacggcctttgaactagcctccctagtaggttcagtcaccgacgagggcaacgactccatagcctcgagctcttgctgttcggtatctgtggcaaacgcgttcggtatcgactttgacagttccagcaagaacttgagctggctctgggagatacggaggttaattggagatagagaaccctcgatttccatatctgggcgtgggttgtttgcttgatgctccaaatagcagatgctgaactccaagttcaccttctgaatcatctccagctcctcggatgtaccatcttcgaaatggaagttggatgtcaggcgaatattgcggacaccagtcgagatgacgttgacagcagggctgtcctttccatcatccatagggacaaattcattcttagcataaatttcaccgaggtgagcggtgattgtgtctcgagggcgaccgtccgtcataacgcgagggaaaactacaatgggcgtcttcacaataatgtcaagccgcacacgtgaagcattctcctggagttggttggcctggctggcagcggcttggcgagctgcattgaaaatggcttgcatcttgccaaacttgacgaggaagtggatgatcttccggtagggctcctctagaaaattgatcttgatcgaaccagatcgcagatagacctcggaatcataaccggggtgtgtctcactatcgggatcgaatgtctcgtacttgaagtccgcgaaatcatctccttctatggtcagaaggcgtcggatatcagagtcctccgcggcacccaggttgacatcgtcgaccaaagtcagacttcctatccgagactggatgagcatcgagctgcccacgaggaaaaccccgacgtcggcagtgttcaaactcaaagttgccaagcggactccatcattgttgaggatgagagcaatactcttgaggttagccttgatgcggattttcccagcttgctcgggcttctcttccacactggcggtcccttcaatagccttgtctgtttctgggttgggttgagtcggttgttgaggatttgtgaatgtaaggagggtgaagtctagaagcgtgagaagtgtttttcttgtcacgacaagattgatagtggagactgatatgtcaaggttcatggcaaccccttcatacgttgagtcaaactcgggtgactcgggtttaacccgtaccatcttcagctggaacaggtccttgtcttcgtcggcatcaaagcctttagaggagatgattctcttgaattcaggaaccggattctcctcgatgtgatcatctacgcttaaagatttcagaataacctcagcgaccatgtcataggggcgcatataaaagtccagctcaaatccttcggcaaccagttcaaccagcaactgatcccgttgcgggtcatgggggtcagaacgggagagtgatccacgtagacggccaacagtgaatttgaattcgaagtctcggcgatggatattggccggtgtatcgacacgcttctttgcatgttcgctgtctacttcatcctcatcgtcgtcaacaacagggaggtcacgttggactgctggttggaaggatgatgacctgtctcgtgtggctagggctgcttcttccttggctgctgcagtaactgaatcagaggcagacttttccgtatcgaattccgggattgcaatatcaatcaatttcatcaagcccttgtatttggtgtctgatattgatgcgtgaagctctggcagatgtccagagatgcgcgttcgggtaagctgtgtcacgctcggtacgatacacatctccagggcaaagtcgacattgatacggtcgatgatgtggaaattcctagattcgacattcgtgttgagctgcgctttggttgcatcgacgccaggtccgatgaggacttgggtggagtccagtttgatgaggaagcgatcgtacatcagatgctccagttgcttgtaatcatcctccgcatattgttttttctgcttggactgaatttctcgcatcgctttgcggtcgaccaattcgctgttgacactggcatgaccggcgtcgataatcaaacaaagtgaacttggttgtgtgatgctttctggtacaataatcaaaggcgcgtggatatcgaattgcgcatcaaccttcttgtgttcttgcaaggcaaactcgaggccggcccgggtttgctgccgcagtccttcaaccgtggcacccgcggtatctaagagagcaccaatcgactccatgtgtcgctcgggcggctcaaagaacttcacaattcctacgaggaatcgagggttgtaaatgacctcaatactcttcagcttgacctttaccgccgtatctgcatcgctgtcgagcgggttcttctccagttgcagatggaacaaactgtcctcatcctgaagatcgtctgcgctagtttgtgaggcgagctcatcatcatcctcgcttagctcttcaacctttgtagattcagggggagaatccttgaccttgacgatctggggataaagagtcccggcagtagtgccatcatacatcttcagccctccaaggtccagatcaaggagataagaatcatggcgttgaagtgccttggctcggaaattgtcaaacactagcttcatgacctcattggctgacccgtgagggtcctggattaacgtaaagctaccagctcgaagactccaattgacctgaagtttgacccattcccggggcacatccacactctcggtgatagccttcttttcatcccaatcgatggcattatacaactcttgtcgctgttcttcagtcatagcagtctcctcggactcttctttcttagcgccccagagccaggcagaccatgattgttgttctgcgggctttttgaccccgacattttcttttcgtagctggttccgtgcaagtgagcgccagaatcggatatcttcgtagctcagttttgcttccagtctctgcagttccttggtttcttcgggcgtaaaagcctcttccttcttcgtttttttgaacaaggcaatgtacgcgatgcggtcatctctgcgctccttgatatagtcccaggtccagcgcctgtttcgttcgtggatcttgctcagaacggcttctcctgcgaacctcatccatgcccgagggtcttcctttggtgaggccttaggctggattttcttatgttcctgatggcgaatgaaataatggaatagatcgaccagcatcaacgcgtcgcgatattgtttctcatcaagaacaaagccgagctcatcgaagagcaaccgtgctttgattgcgggccgttcatatgtgcctgacttgtccatttccagaccagcacggccactgacggggcgcaacatgaattggtttccttcgtcggcatcaattgcagttctcagtttctctatcagatcagcgcggctgattccctgggcctctgcgcctatatccgagcctcgcccggttcccagcaatttggcatcagtattccaataagccgaaagagcaccgaggacggccaatttatgcgtgacacttgagtcggattggatgaaagtcggattccattccccgtctgtgctgacggcactcaattccttgagtgtcacgccgacagcaaacggatgcccaggtgatgcgatagagtcttcgtagcggaaatgcacattcttgatagaaatctgcaggttgtccaccacggccgtgatcatgctctgtgtgaagctctgattccggcgctgttcctcttggctcatgccttccgcattgcgctcgcgcagaatctcggcgctctcgacccgttccatcttcagcgcattctctctctttgcttcctcttctgggtcaaagtccgcatcttctctgggtgccgcgagcaggaagacatcttgaatatcgactttcaccggtttgcctcgtaggtttgaccatgggattgatagtgtaagctctccgagatggccttcgacgacgtttagagggaggcgtagctgatcgagcgcttcgcggcgtagttcaaggttccgtagcttgacgtcgcctgaccagattccgatgttgagctgggtcgcatcgaagttcttgacgtaaattcccaggaaccgattcagtaggttcgctactactccctccaacatgattgcggcgtggagccgttgaccgggcctggtggtcggactctatggccggtgcgggtgtcagcaggtggggattccacgatagtctgtaattgaagggatttcgcaagtcagtggcgatccaagtgagaggaaacaagggagcctcttcattaaatggactcttacgcgatagaagggttgcttttatgaaccctggctgatagggaacatccaagccatccaactgagagcacgcgcgatactgaggtgggacctttttcccctccaagcagagcggaaatcggtgaagatatgactagatgtcagattaagaagggatgtagagaaatcacaagcgctaattgagacaaaatgatgttgggtattccagcccaagttcaggcaagttaatggccctgattgcgtggatcaaaagaggtgatatctgttacgcaaattgtatgatcgaggtactcgatacaaacggggtacagcttcttacgccaggggcgggtatcattcccgcctaccaccaagtatttgcaaggtacagagtactcaagccacgatacacttggcactacgtgggaagttggggggccagtggtaagtattttggttacttttgttatcaaagccgtttacgcacgaggcaatgaccctgagaatccctgcaatatactgtaccgtatgtactggtggatacacttgtttaccccaggagtgacgtagccaccctggttagggcagcagccccccgaatttgattggctggggaagggacattatgcctgaggcaactttatcgacacctgaggccaaagcttctgcatcgagttgcaatctgcacttccggtcgctgcggtccgccctaaagcacaccacacctcatcactcggtcacttcatttctggatattcttatttgttccctcccggaaagcccacgccgtcgactttctgatcaaagtctttttccgggtgtataccctcaatctccactcttctacttctgtccagcttttctttcaggccaattgggtgagtaaacactgctgtccggccgtacccgaggcttttctcctccaacttgctaacccgacgacaacgaaaagctctatatctccccgccatgtaccgcaacgccgccgcccgctccgcgctccgcgcattctcgagctccaatgcctccgtggctcgctccgctctgagcaagcagatctgcaaggcccagatgacctcgtcggcccgcagtctgctccgtccctccgtctcgtgcttcgcgctcgccgcccacaagcccgtcaccaccgctcttgtgcgctactcgtcttctgcggctaaggtgagatacggcatacgtcttgtgatttgtggtttgcaaaagacactcaatggctaatgtcgatacaataggagcacgatgatgatgatgttgatgttatggcgggtatgaagtccgaggctgtacgtatttccattcgatgtggatctgggtctgcatatgctaactgtgcctcgccgatatagaaagttatcaaggaaaccttcagcttgagtgaggtccccaaggaggccctctacctcggtatggccggtgtcgtcccctacctggccacctctctgcagaccgtcttcctctcctacgagatcaaccgcgctgctgctgttggcgaaggtctgatcttctctggcgagagtgctgagctgatgctgcacatgctcgagcccgtccagatcggatacggtgccgtcgtgagtgatcccgagtgtcttgagtaatcggttagaagtttgctaatcgccgttatggttagatcctttctttcctcggcgccatccactggggtcttgaatgggctggctacggcggtaagttcggttaccgccgctacgccgccggtgtgatcgcccccgctgtggcctggcctactctgctgctccccgtcgagtacgctctgatcagccagttcctcgctttcaccttcctgtactacaacgatgcgcgtgcttccgccgccggccgagctcctcactggtacggcatgtaccgtttcgtgctgaccttcgtcgtcggtgcctcgatcgtggctaccctgatcggccgtgagcagatccagcagaccaccgcctccgagcacagcatcaaggacaagatcaacgctctgatcttcttgcagaagaaggagaaggaggaggctgcggcccgccgtcttcaggcactcgaggtcgaggattccgagtaaatatgccttttaaggtgaggggcatccccccgagactgatctcgatgtttgcattaccgtgatttcctgtagaatatacgcagaacgaacgcactaggccactgaaatttcttttgttcaattgaagtgtcgtagttgggacccaagtattctcgagtaagagtcttatcgtgagggatttgacattccgcatcgagtgggggtagatataagcgtacgggtagcaggatataggtatccatgggatgctcccgcattataatttcatttcttttttcttttttcttttctcaaacggattcaataaagctacactcgtgcttggcatcaaatctgagttagagctgcaagattaggtacgtacaatagctattatatgtcgcaaaagggtacaattgctaatcggcatcttcctcaggtcacacgggttgccgcagatcggagagggataatccaaaggggtaaaacgaatctcacgtacatactcgagcgggtcgatcccattgaaactgtcacggggtgccgaaaatatcgactaaagatctcacggacggagctagctgaaacggcgctggaaatgggaacaaaaaagagggtacttttgcgaaagtggcatggctttctttgctttctttgcttgcaaacggcttcgggggaaggtaaagcgagacctgcatgcgaggtacgcagagtagcgcccaatggcgccagaaaaaaacaacgctggaatccacctggatcggccttttcgtctctttttgtttttttgtttttgcttattttttctttttttggggtgttaatctatggagtacaactgagggagcacgatttttcgtattgtaagttgtacttgttcgcacgtccccgttcctggcaggtttgacaacatcccctctctccacgtctggagataatggcctcttatagggcaattcagccggttcaccagaccagttccagttctccgtgggggaaggaaccttggacattactagataacgtcatctgctggggttatacaacgtacagattggactattctacatcaagcataaatgccaatctgccaatctgccctgagacagggatcttgaatgagacccgggaagtagggagtcaagatcataggcagttccccggaggggttgacgcactcgaatgttcttggcctggactagcccgttctccagatgggattcccttgatttctctctccctcataggctatataccacatccgagaaagctaataattcaataattcttccatatggtgggatatgatattctccatgaataggattttaatcaaagaatgtcaactaatcagaaagggggggggttctagaacgactcaagtgaggaaaaatggaccgtgtcatgtgtacgatcgacggggcttgtggagtgcccaggcttggatagacgggggttggagttgtatatgtgtaatatatacggataggactatggtaggtaactagttcactagttataggacaggatagttataggataactataggatgggtattactagatagatgctcgctacaataagatatataccctatataagactatatccttaatccttaatcctataaacgtccttctccagctcatctcccatttataaagccaaatagtgggggaaagtgacgaggtcttctgatcaaaaaaaaaaaaaaatcccccgaaccggatttctcatttcccccaccccacctgggctttttcaatggtccacccctttggttaaagaccgctgccctggtgctgtgggagatctttcttgttttctcccgattcttccgttttctctatatacgactcgatactggcgtatacctcgactatttacctcttctcctccttcttctgctacctttcaccaaccctcaacaatttccaatctccaatctccattctccattctcacctttctcctttataacggtgacagtgaactgccatatttcacttctataccttggccactgctctgatacgtcacgctccacttttctgccacgggagctggtccccgtatccccaacaccgccacctcgtagttctcctcccctccgttattcccctctttaaatcctggacagtaaaatcgctctctctcttaatacctcttttttcacacgttctggaagatgcgaaacccattcgatttggactttgatagcctcgatggagactccgagcccgcccgggatttcgaggcccccgaagaacatgtgcaccagcgagtggaggacatacaacgagaacacctgaacctcaactatcgtcccaaacagagagacgatggagaccggtcgttgctgcaggacgaggacgaggatgaaatgaagagtcgattcattggcaccattgaccagggtacaacgagtacacgattcatcatcttcgattgcacaggtgtccctgtcgccaaataccagactgaattccatcagattcatgaacatccagggtaggtgtcacaacccatccctttgaatcctcccccgactcaaatattaatttgccccgcacccccacagatggcacgaacaagacccttatgaattggtcgagtcggtctatatctgtatcgaagaggccatgaaatccttcctcgccctgggctactccacatccgacatcgaagccattggcatcaccagtcaaagagaaaccgccttggtctgggactgggagaccggcgagcccctgcacaacgcaatcacgtggaccgatactcgcaccgtcaacttggtccgggaactgaaagaaaggcccggcgccgacgaactccgtgatatttgcggcctcccgctctccacatacccctcgtccgtcacgctacgatggatgctcgaccatttgcccgacgtccggtcggcctatgacgatggccgcgctgcatttggaaccgtcgatagctggctcatctacaacctcaacggtggtccgaagaacaagcttctggtgaccgatgtgaccaatgcctcccggacgatgttcatgaacctcgaaaccctccaatatgacgatcgcctcttgaagttcttcgacattgacccgaccaagatccgtctgcccgagattctgccctcggccgatcccgatgggtttggtagaatggccgaagggccgctggagggtactcccattaccagctgtctgggtgatcaggcttcggccttggtcggtcactgtgccttttcgccgggaatggccaagaacacttacggtaccggatgcttccttctctacaatgtgggcgagaagccggttatctcaaaacacggtctcttgggcaccgtgggcttccaattaggccgagaccgcaaggccgtctatgcacttgaaggcagtgtggccgtggcgggcagtggtgtctctttcctaatgaataaccttggatttttccgtgactcacggaaggtcagcgatttggctgccagcgtgccagataatggaggctgcattttcgtcactgcgttcagtggtctttttgctccttactggatcgatgatgcccagggaactatctgtgagtcttgaacgtgctcgtcatccaaaaacctaaatcgctaacactgccagggggaatcaccgcccacacacaaaaaggacacattgcccgtgcaaccatggaagcggcctgctttcaaactaaggctatcctcgacgccatggcaatggacagtggcaagggcctgacagaactggctgttgacggcggcatgagtaactctgatatttgcatgcaggtatgttgcaacgtgttttctcttaaactctcagacccgctaactttcatttgtttcagacccaagccgatattattcaaatccccgtcgaacgtccctccatgcacgaaaccactgccctcggcgccgcaatcgccgccggcttcgccatcaatatttggaaggatttctccgaacttaagcacatgaaccgtgccaaccgagcctccttcgccccaaggatgtccgtcaaagccagcggccgcatgtataaaaagtggtccaaggccgtggagatgtcgcgcggctggatggccgacgaggacagagaggaatacgacgaataaacaccttttttacatatccttttgagatgaccccaatcgggtccgtcatcgaccccgcggcccagtttgtgcaattcataccatgcacgatacatacacacgcgcaagaagcaagaagcaagagagatttgagaggtttacatgaagatcatatcaaccggatatcgcatatattctctcttggagatacccggaattttttctttttcacagggacatctggaacacctcgcgtcttccatttatacatatttagagaatttccaatcccgactagaaagtccgtcctaataaggcgttttacccgcccacgccgatgtccccctccaatcatgaccgttatgacgggaagtcgtttgttccagaagaagagctggggattttaccttttttttttttatctcattttgctgttggctagcttcctctcctggaacaagctcgacttaactaccacttgtgtacatacaacccgtttttgagaagaaatgaagaaaaaaaaaaattataaacatgtcattctcgttcgtacgcaaataaacaatgaagcttaaaactttattattacaacattcccacccggaatcgagaataccccggaatccagtttctgtctccggattgacgtaaacaccatgacatcataacagcggggtagtaactaaccaagattactggttactggttctaaccaatagtggagtgagacatctggttcattttttagttcggcgatgtgttcaatacatacatagcttttcagatcacatgatcgcttcagcctgtggtgtcctaccatacatacatagtgaatagatcgtagaggcttcgctgttgaacccttggaagtggctacgatccatctaatgcatgtagagagggatgttgcttgggtcatttatattcccctgtcacggcttcattcacggaataggccgagatttggctgtctgcttagggtttgggttgttgctatatttggctcgggtgccttgggagggatatatattgtacaacatatgttcatctacatgtacaacatacaccgaagttggagtggaatatatgtatatttttattttcatgctatatcttccctctcggtcattttcatgaccgctttgtagatataaccatatgtctatgagagtaccaaagaggattggcagctttattctacaaatgcgatcgcggatcacgtggtcacgtgcaagagggtatatagatgacctcatatcgcggttattacatggcaaattgacgtcagatgatctccattcgagatcttcaagcgcggaacaacagccgataaccagagtcaagcgtcaatctgactgagacatgatatagaagaaagagaaccaaagagatatggtattttcaatagacgcctggatgatcgaggatgcaaaatggagatgagaaacaggatacatgggtggttgtttgtagagccaacaagaaaataagacaaggaaatgaacagaaaagtttacagagtcggagatgacttattcattgaccgtgggtgctcttcctgccgccgcggacgagttgagattggtcgactgcaaagcttcagggagcttcagcggtgcactgggcaagatcttgagtttattgatcttctcgcccttcagcaccagctccatctcctcctttgtgagagtttcatattcaatgagcgcattggtcagaagctcgagttccttgcgcttttcggttaggatggtggttgctcggtcacgggcttcttctataagccggcgcacttcgccctcgatctcttgcttggtttccgacgataggctgtcgtaattcgtagacaggtcgacgttgccgagtttcttggaatatccgaaccgggtgatcagcgtgaaggccgtctcggtggcactttgaatatcctaaagagaccattagtaccgagaaaagaagacaactaactagtaagacttacagctgagatgccactagtgacattgtcgtggccgaaaaccagctcttcagcagccttgccacccatagagacggcgatgtctgccaaatattcggtgtagttccttgaaacggtatccatctccggaaggaagtgagtaatacccagagccataccacggggaacgatggtgatcttgtacagaggagtagaggaaggagagaagtgtgcaacaagggcatgaccagcctcgtggtacgcagtcaagagcttgtccttgtcttggatgatgcgactgcgagcctcggcgcccatcataatcttgtccttggcccagtcgaagtcgaacggccccacattagccttgcggtcacggctggcatggacggcagcttggttgaccaggttctccaaatcagcaccagagaagccgggagtgcctcgcgcgatgactccgacgtcaacatcaggaccgtattgaatttccttcatgtgatgtctcaagatgtccattcggccgcgaacatcaggaaggtccacaacgacccgacggtcgaaccgaccaggtcgagtgagtgccttgtccaggagttgagggtaattggtagcagcaatgatgataacaccggtagtctgagagaatccgtcgagttccgtgagcaactggttgagcgtttgcttgacataagcagcatcccgctcgtttcgctttccacctatcgcatccagttcatcaatgaagatgatagccggagccttggcacgggcctgagcgaacaaatcacggacacgcttggcaccaacaccgacgtatacctcatcgaattcagatccagacatgtagaagaatgggacaccagcttcgcctgcaacagcacgcgcaagcaaggttttaccagtaccgggaggaccgaccaagagaacacccttgggcagcttaccgcctagggaagagaaacgctctgggttgagaagaaattccaccagctcctgcagctcatctttagcctcgtcacagccatgcacatcactgaaacgagcggtttgctgctcaggctgagcttccttatcctgcgcaccacggacgttcttcagaacgccagtggtttcaaccaagatagtgaccgtgaccagggagatgtaagtgaaaaagccgaaaatgagcaagaatttgacccagcggaacacagtgcttccgagagactcatcgaccacaacgtagagaggagcatccttggcaccggtaccgttttgttttcccattccgatttgactgccagtagcccgagcagccaccgcttgaccgactgcctggagctgttcagggctcagattgtggtttgacccgccgaaagctccagctccggcgtcggcgccaccgacgattgactgggcctgttggactaatgcttcagttgtgagatctcctgcaaaataaccgctccggtgtcgttcgagaactatgcccggcattttagcacgcaagagagccgaataaagagcattttgagcgtctgcgttattgggactttgattggcgaccttctccttctgggctagtacatgatgccaggacccgccgaacaggaaccgttgctgctgtatcttcgaaagaccgttgaccttcggggccgcgcggagggagttaagacggaatggagttagagttgagtatgaacgagcaccggggatagcatagcggatcggcataaaagatgaggtggtccgaagtgcgttgtctgttatcaatgattagatatgattcatcaaagcaattttctcaagccaaaacatactttgattgagcaatgaagaccacgtttgctgcgaaggccggctgacgatctccgctcgcagggcttcggtggaaatgccttccaggtattcaggcaaggttgcgcgttgagagatctgtctgtatcagcatgaagatgccaagtggatgataggttatgccatactgtttcagttcctcggctagtactgcgccggaaagactcgttgacattgctcgtcgttcgcccggtctgcttccagggaacagccaggatgttatacattgaaggccagagatccgatgtcacggcagcgacattctagcagattttttgggtcagttgtgggatctggatgagaaaccgcggagtggtactcacaggcatggggatcgagacttggaaggccatgactctccgatatacagcggcacgcggccgggtgcgaggatgggcgtgtgctcctcttggtggatttacagccggaaataaaatttgaatctgttaagcccgggttgaagagactgtcattgctgacacaagaatgaaggtagagaagaaggcgataggatgttccgctttgatgcggcgaatggcgacggccacttatgtccgaataggcgaccgaatatatatcacgtgatattaagtggcacgtgcacggcatagccggacgcttcttatagcgtcatcagctctggtcagctccgatgaaggatggaaggagatttaatggggaaaatttgtatgaattaattatgcatgggcgatttggcagagaaaattggtagcaaacgggtaatagtagccgggaagggccaggtacaccagggctgttgccattgacagaagctgcccatggttcgcgcaccccgatctttacaaattgcaacgtcttgacgtccacgagcatttgaacttcatcaccttcttgaggctcttaaaagggccctgtgatccccctgctcgatggctccatcgacatttcggcccacgctttttctcacggacaagctccccttgacctgcatattcttaaagacagacttgctatgtctcgaaaatatatcttcttggtaggagctccgttgccagcaagtctgaattgggatacagacgagcttctcaacacgcccatacctccattttacgagaatacgacgagtacagaacaacagctatccctggagcaaccacctgtaagatggagagtgttacggtcagcatcagtcgacaagctaggtgaaaattatgactctttccaatactatgaggacccggcctttttcatctcgcatcaactggctgttgcgacagatgcgacacaaggatcagaagattcgattcttcaattctacgaccattctttcgccatccacgaaacgtccgaggtagctggctcagatgtgtacgtagcagattccacgcaggagagcagtttggacgaggacagcatgttggctagcactacggggctggacaagacagacactccgaggtcacctcgcattctccataatcctgggtccctcattgatttgaaagatcttcccacggccaggtacatccaatcgatcgcaccgcaaacgatgacggtgaatatgattgtgggagtgctggccgttcaccccccacgtcgcatagtaacacgacaatggaaaaccgaactggacctcatcgagcttgtcgttggagacgagacaagggctgggtttggagtcaatttttggctcaagccagagaagccgaccgccaaaaacaatgaaccggatcgtctaggtcgttcattggcatcacttcgacctcgcgacatcgttttgctccggaccgtcggactcagtacattccaagaccgggtgtacggacaaagtctgcgccgagggatgaccacggccgagttgttgcatcgacaaccggtggatgtgacggatgcagttggattctatcagggcagaatgcaagaaattagctcccaggatgatccgccggcccttaaggcccgcagagtacgaaattggatgctgcggtttgtgacggattcggttggaatgtcacatccatgtggattacctccggatacgcagtagttagttaattggtcaaagtagtaactattgctttcatgctttatgtgaaatgttaacttgatatccgtaggttccgtagagatgtgtctttagtgtacgtactagcgccagaccaattgtatctgaaacggaagaggggaaacagggaatatccccccaccaccaatctccccatcacctacggaggactccgtatatgtaggtttcaggggcgatacctcatgaccataagaatttgaggtttagttttgcgccatctgcattgtcgtataaatcatgcaatagcattggacatactggccggggatggctgaactagacctcaggagatcagagacttcatccacgcgtcagagcggcctagttccttggaatgtaattagaggaatgcctaatccattcacagcaagcaaagtacaaagtcatttcatcccaaacatccaaaagcagtcaccacagctctaaacagccgaagtcgaagtatatggcccccttttcccgcaaacaggcccctccaatcaccgccactcacgtgcccccacttggacaaaaataaatccatcaacggccaggtgttccctaaataacagagcgtctctccttttgcttctcctagcctctctactctattcctaattttctctaattttcactattactttcaattccaatacatcatgaagggtatgtgctattgtcaatgcttccatgtctccccgctaacccctctacagctctcattcttgttggagggttcggaactcgtctgcgtcctctggtaaatatcccgatgattatcttatggcctattgtctatttggcaatactaatattgatttattttagaccctcacccttcctaagccattggtggagttcggaaaccggcccatgatcttgcaccaggtcgagagcttggctgctgcgggtgttactgatatcgttcttgccgtcaattaccgcccggatgtgatggtcgcagctctaaagaagtacgaggagcaatacggagtcaacattgagttctccgtcgagtccgaaccgctgggcacggctggcccgcttaagctggcggaggagatcctaggcaaggacgattcgcctttcttcgtgctcaactcggatgtcatttgcgattaccccttcaaagagcttgccgaattccacaaaagccacggtgatgagggcaccattgtcgtcactaaagttgacgagccctccaagtatggcgttgtcgtgcacaagcccaaccatgcctcgcgcatcgaccgctttgtcgagaaacccgtcgaattcgtcggaaaccgcatcaacgccggtatttatattctgaaccctagtgttctaaagcgcatcgagctccgcccgacctccatcgagcaggagaccttccccgccatctgtaaggagggccagcttcactcctacgatctcgagggcttctggatggacgtcggtcagcccaaggatttcctcaccggtacttgcctataccttacttccctggccaagcgcaaccccaagatgcttgcccctcacacagagccttacgtttacggcggaaatgtcatggttgaccccaccgccaagatcggcaagaactgccgtattggtcctaatgtagtcatcgggcccaacgtcgttgtcggcgacggtgtccgtcttcaacgctgcgttataatggagaactgcaaggtcaaggaccacgcttggatcaagtccaccattgttggctggaacagctctgttggacgctgggcgcgtctggagaacgttacagttctcggggacgacgttaccatcgccgacgaggtatatgtcaacggtggctcgattctgccccacaagagcatcaagcagaacattgatggtaagttttcgtttctgatcactatccctaacaaacatgtactaattaattgtacagttcccgcgatcatcatgtaatccttttcctacttccccctcttccttcacgtcgctatgccttttgaaatacctcccttcaactctcgtgccgataccaccctccagtccgccctcttgatgcatagaaccggagtcgtttactgcgtttcttctgtcttctcttctattgtcggcttgcctttttcctccttgacggtttatcgccctcacaacttcctcccttccgtccgataatgcacttagaaacctagatggtgaaagcgtgcgatttcggctgttttgcaagaaataacttcttttagttttgtttgtctacgtttatccttcgagctatccccgttttagtgctacatattgagggtttcgtcgctacatccccgctcccctgcgcttggccacttgttttcattcaattttttcgatttttttttttactactgctagtcttctggcaattgatgggcaaagaaatcatgccatatccgttttaatgagaacatgggcgtgggctggttctgttgatgtaaataatgggaggcgaaattcgcaaaaaaagatacaagtttagttgatctttaacacgattcttcagatgtttcatatcagatatctttgtagaagtatcatggatggaatattagatacatatttggggataaattacatacagtcattgaagctgttctgcttgaatcagttaagcaggaaattgacttgagagaagcataatgtgtctttgacaaagtcgtgtctaggaatgagcctcagctcgatccaggatctcatcccactgaattctcaactcttccatctgcttccagcattggcgtccgagttcctcgaactcttctctcttttccttggtaagatcttctgcgccgcgcttacgacgtcggagccgatcagcctcaacgacgggcgtgccgacaacacctccatgtccccagccgtcgacctcagtagaaaccgcactttcaatgccaagacgcccgcaagacgaaccccatttcgctctaccgccaccagcccggtggtaaggctcttcggcagcttccacgtcagcctgcgatgccagcgcgaggaagaccggagcacaagcgccgaggtaagtagacaatggatgccagggcgagcccagcatcctcgcagtccagaaagcagcaatcatcgcccacgcaaggggcagaataagcgggatgatagatgtggcgcagataccagggtgagaaagatacatgcgcggggtcgcgtcgggggcatttgtgtggatagcatgtgtgtcaagttccgtctcagactgcaagaagctatcgacaacccagggggccgtactcggcagattggaagtcagcgcgaggatatcagtgagagccttagaagactcatacggcgcatcagtgcgcaaaccctgaatatcgtctattttgaaaaagttccaagtcgcttcgagactagaaacccagaccacacggccaggcccgttcgtgtgcgcccgcttcagcagcggaaccaggttgtgcgccagcatatagtgcccgaagacatttgcgcaaaagactgctccgagcgcgggctcttcttccgtctttgtttgcttgtttgttaacacgcccgtcggcgctagcttataggatggccaggtcaccgcgtggaggagatcggtgcaaacctcccaaatggccgtgggccaactgatgccggaccagccgcccagcccggcattcagaacgatcgaatcgagtcgggggagagtgtgcactagttttcgggaaagttcgcgcactgagcggagatcgccgaggtcgacgctctctgagacgaagtggacgcgcgcggcggcagatgcggagggggaggttgcttggaggtgtgcttctagtctgcggattgtgtcttgggctttgcgcgcgcttcgagttgtgaatattatggtgagagattcagattctgcgtgggaggagaggaattcgtcggcaaggcggcagcatatggagaatccgaggccgctggatggtctgagttagtatagggaattgagctgaattggcatattgagaggtttgcacctgttagcccctgtcaccaggatgtgcaacatattttgctgctcagcggacttgacctgatccatggcttgttgcttcggcgagtttgttgactcggcaattttcttgatatcggagataggggttaacgtgataagatgctcaacgattgaagctgaggttggagaggattttgcgcgttgtcgcaatggaaaagacacgcggcaatcagcagcacctgagatgaaatgaatcccccgaagtgagcactgtcaatgtctcttgtcgaaaatccaccgaacggggaaagtgcccatcgcacagatcacgtgttcaactttaatcttatcgttatcggattcgtagtccacctggacgggttgttccaaggttcccgtcatactcgcttttcacgttttatggctgagatctgctaaatcttacccaaatgtcgtgcagctggcatacaggaagccatggtagtcagacttgagcggtttctcaacacaaccggtttcttcttcttcgctatcgtccttttctgcctcatcctccttacaccagcggacgccatttaccaatgctacgagactaatcgactcacaaacatcttcttcattaccggcgcatatgtgatcaccttcctatttgcagtcctcatctatgcgacacgcatctacacgaatcgcagtgcactcaccggcatacccaaagcctggatccccgtggaaaaggaagatgtgaacaagagcgttaggcgactggtaaaggaaggcctcatccgtagcgccgtcatcgcctatcaagcccgcccacgcgacgtctccaccgatgaggacagcttccaaaaatacagatcgcttctcatcgaccccgaacgacccccatggggccatgtcgagcaccccggctggtcttcgccagactcgccagacttaccgaatctaccataccgcacagtcatacacgaactccccagcttgattgaagccaaagctgtctcccttgcccctattgattcattatcatctgcgcccacataccacttcgatccgtcaggcgaccttacgatacagtctctcccggatacacgcgtggtggaagtattacagcgtccagcgtcaatgggtctgagagaatatatccgccatctgacgtccctcggggctatcaatccgccagaactcggtgcggatttccttgcgctgtacgaacaagccagattctcgacgcgcgatctacacgagacggaattccgcgacctgatgcacctcttcgcggagattctgagggggatgacatcccttgcaccaccgatcctggatgaaattcgcgacagcgctagctcccggcgagcctatagcgaatctagcattgaatcctcggatgatgagagagaaacagataccgggacttatggttatgacgggactctagggtacatgcgaagtaacagccttcgcccatcgaatacgtctacctgggagacccagtccgggtatgacactgcgcccgcaaggcaagatgccgcgtctgaattgtcaacggacagtggatcctccgtggcacgaagctttcttcataccccttctacgaggtctctacgacgcgtggcctcgggccaatccggcagttcgggagggagtgttattcgtctgaggcagccacgagatccgacagatttgccgtatacaattgactacgctggacgtaggcaatgataataatccattcacacttgtatattacctatagagcaacgctatttggacacgcaattgcgccaacggaaccttggaagtggggatggacttagtcaggcggaaaacattccgagtcctgtccttggcaaaacctgcaaaatgattgataagatcagtttatcattcgacgactcgtcatcagaaaaaagagtccaaactagcagatcttctcctttttcccattgttgaagaagatatccatatcgtgtaaaatgcatctctttcgccgcgggacttcctccctctttagctcctccaatgtctctgccgcctcctccaggaccgacatcaccaccgacgctgtgggtgacaataccctcgctgcagatggcttccaaaaagtctcgtcgagcgataagctcttcaaaaaggtcgatccagtggtagacggcgaagactgcctgcacgactgcgcgacatgtacgatcaaataccccgcaaaattcgatgtcgatcagcaagacgaactatacggacaagtcaacggatgggcgacacatatgctcgtcgcaacgggcaagtcagattgggtgagagacgtggcagacgagaaagggagcgtcatggaagccattgaaaagggaggactggagccgagcaacggggtatgacaatatcccgacctgccaaagtcaatgacatagagactaacaaccccttttcacagcgactcaaactgtcagcatccaacatgcccgtcccagacgaataccacatagccgacgcaggcaaacagcccacaaacgtcatcctgctgccgagcttcaccgtcgtcgaggacgtcaccccacagctagtcccagatttgatcgagaatttcatcaaccggaccctaacaacaacaacgccactaggcgcaattccagaaaaaccaacagaggaagaccaagaccaagaccaagaccctacgcaaatagacctcccacacccatccacaacatcaatccccacttccctcaaatcccaccccagcccgcacgcagccgtaatcctgctctgctcgcaacgcacgcgtgatgcgcgctgcggacaatctgcacccctcctgcgccgcgagttcgagcgccacctgcgcccactcggtctgtaccgcgacatggacgaccaacggcccggcggcgtaggtatctacttcatcagccatgtcggcggtcacaagtactccgcgaatgtgattgtgtaccgccgccgcgacttcgattggtacaagcgggatgctcctgcggacggggaggggcgggcccctgatgagggtgcggcgcagggaatctggctggcgcgtgtgcggcccgaggagtgtgagaatattattcgatatacggtcttgcaggggaagttgctcaagcccgggcagcagttgcgggctgggtttgatcgtgagcgtggggtgacgagttggtaaagttcgagctgggttggttagttggtactttggagttggtttagtggatatcacggacatattgctattctcggctgaggttgattgcctgatgtatctgatttgtgcttttgtcttagtattctatacatgtggcgctgcgccccaggtcagatctgccttgcgcatcacgctaatagctttactccgtattcgcaggctctgtactccgtattgtatttattattacgattgtacggatttcagaaaagaggtgtatgctggaggtatctccagtctcatcaacccttggccttgtttcgcttcccgtgcctcacaggatatcattcgccacttgactacagtgatatctatgtatacttctattagatgaaacatctaccaacgccgacaagcaatcgatggctatagctgctcaggctccagacacgtgcaccatgtcagccatgcaagtcagattgcaaggtcggcatttgtcagccctacagccatatcaaccgcaaatgtcggatctccctgtcttattatagactataactagtttgttatgtatgaaaggagacagacaccttacgtaaacataaccaagtgattacctaacctcccacctggaccgtgcaccggtggacctcccgtacccggcggacctcagggggcgtgctcaattttactcggacggaacaccactgtatcccaaacatccaccaaaggattataaagccacgctatcgactgtgctccatagcacgttagttgcagcaaaggcgtgcatgcgtacccgacggccgagacggccctacaaagaaaaacccatagaaaaacgtcatccactgcgaatgagcaaggttcattgcccatgactggactggcaaatgatgcaaggccaaggcaacaccagccgctagttatccctcaaccctcgggtttctcgctcgccaggctccaccgggcttgtttgaaagtaacctgggacggtcattgtacagaatagagccgatgttcccccgtgtgttgcggttatcaacgcccccttgcacggaaaacggtgggttgcgggaatttcgtacatattgttgtcttatttttgcgggggaggacggaatcagctccaaacgccaaactccaatacgtcatttctgggttttctttcgaggtatcttgtatcttctatatttacatattcgtgctagataggagctcggagatagtgtctcttacggcaagacactcccgggcgttcagtaaggaggactgaattcctttgctgtcagccgtgataggggcttgcggtaagttttccgctgatttgatcacattcttctcttcttctcactggcgttgttggctttcagaaccaacatgtggtgtctaacttcgaaaccagagtcaaaatacctgcaaggggtcaagtggtggctgttcgccttgtcgcaacatcctggccggtaagttatcatcgagcgctgataggcaaagcccggcgttgaccgacattcgcgcaacgagagcgagagaatgcgaaatggcacagaagggccgagaaatgcgaggaatttgttccggcctattccactccggggatattaacatcgatcatcgaccgtacgcacgcttggagaaaacatgaccacattcataccgtctaccgcctccttggtgagaaagctcgcggagtaaacagccagattgccgaatcagaatccacaggtttcttagcttccttaggtctaaagtgggggatatggatagtccaatgagctgctctcattactgcgtcgccatgcgcgcgtcggagattaatttagtggcttttcggagcatgtggaggatatttgttttggtccttggagctggtaacctttttcccaatcttcacatgggtataggtgatcgacatggagatatgtccgatctgtttatttcacactgtgaatccgttttgattggactccgtaccaggtactccgtacattcgaatgattcatatttcgtatacgaccaattaccaacaattaccaacgctgttagcggcagactgagggccaaatcagagagctccccgacagcgtcatatcctctcttaatcgccaagatgaaacaaaatgcggggtagtcagagcttctcagatcaagggaaataggtagaggaaaaagaaaatagcgaaaattagagtcccttatcgaactctatggtaaccgcttgaaagccattgtccttgcgtgatgtgatgcgcatgcagcttcgaacagctttgcaacaacttccgactcccttctcctgcattttacctatttcaatcacctgggcaagacggtggagttatcaatatccaaattccaaatatgatatggcccccaaacgagcccgtccctatttggaagccatccactccacaaataagactagtcttagtagtctgcacgcgagaacaaagaatccggacaccaggctcatgggtatctctgaatgacgcctcatttcttttatcctttatccttttttcgcatgcaagcacaccggtttttgattttctcttgccctactagccgcgccctgctttacggcattactatagtgtatggagtatggaaatatgcatatatgcctcaagtggagcatgcatgtgctgtacctacctgatcaccctacacttatcatagccgagcgattaccgtttcatgtagcgtgtattcagggaaccgattaatgatagtcgcggtttatctatgatcggcggcgacattggcgctcttttctgatcgggggtttctgttcgatgtttcgtgttgacaaatctggacccttagggaaatagtgggctgtgcaattttatgtacactatacaacatacaatagcatttctcagtataatctccattcgttcttacaaccgtttatccccataattcatttccaataatattttgattcctatgtcatgttcgattacctcaatggctgagccgggctgtctccattagccactcaagagcatttgtgtgggtccaatccacacattctgcttgcctcgtacactgcgtgcatcatcacgatccggatatgcagcactattggtccttcgaacgagatctacttcactccgcctaccaagtaagctaccgcaacagatctgcacacgttaggcgaagctcttcgaagtactttatacatccctccataccttgtaaacagggtttgtcgatcacgcaaagcgagcaagaagtgaaaaaaaataatacagggaatctataggtcggtcctcattactctggtgtattaaggttgtaagatcagaagatcaccgcagtgaagatgagcgcgagtggattgccacgttcagtaggattaggaaggtagtggtggtcacccaaacgcctcttctattttcgttcagctgttggactttgccaggagatctctagcccgctctggcattttcggctctgatcaccgtagttgttgcgcgaatctcgaagcctcttgcgacaccttttgttgagtttatcgattggcaatggggacatcccgcgctaaccgagtctacccgataagccttgtgaggcgacatgctatctgttggatgctgagatggtttcgccactggattttattagaaccaacatgagaagctaagtggtctatacagcagactttgggtgcgaagggagctaagtgatcgacccagctatggataaaaagcaaatattgtgattggcgctacgggagtacggtgagagtagtgcctgttcagggatagcatgggtatatcaaagtctatggactgaccatgtgaatgtagaagtacaacatataacatataacatatacactacaatatacacagacacagacacagacacatacaatttagaacaagtggagagacgggaacagccccaaccttaagggaatgggacccgaggccttggggctgttcggggtggacaagcgggagagctggggtacctgacccatttgcgaacaccgttacggggtgcagacgccgcgtcatagggcatcccttgcatttgtcgtttctctcttactgttatttacttcttccgagagtaatgttgcaagtgtttttgtggttctttgtttatggagacgcggatattaatggagtccttctagaccctagggaaattacttagtacggagttctgcaccgccaatcccattgacttcctggagaagatcgtttttagcgtcggtgaccttactccgtcgtgaccctctctcatttggaaactagatcggaggagttcggccgcggctaaccttgggaaattggcttggcttgattgtgtaagttgttatttgggagtcgttgagtggacggattcccgagcccccccaatgaatggagaggtacatagtacggagtatatatcatctacacaagttatttggtggcttctttagaagtgtaattgtatacagtatatatttagtctcttatacaatattatagtattatagttaactagtcaccaagttagttaggtagttcgatattaaaggggccaagaactggtttcaaaaatacggtcatatacaccgtatccataccataccataccatgcccagtccggttagcatgtcttgtcattcgggggccgaggtggggcatttggtaaataagctggtaatgtgggggtttcttttttccatgggctatcgcaatttaccattttcagaggtatcccgttgacagtcaaagtttgagtctgaaggtttggaaataaattacctccacaggtattagacggtttgccgatgtgttaccctgtcgagttgagacatgtatttctttgtacaaattgggaatgaattagggaaagagagtgtcgagctaggcagtgatatttaagctgcgagctgataggcctgttcgtatataggatatatcaacgagtgtacctggtacctcagggaaataataatataataaataatatatatataataaaagaaaataataaataaccgatataaaaccaaaataaaataaatatgctcttctacggtcccatccgcgccgtttttcctcccccttcaaggttatattctaatacttgaggctcccctcttctggatcttgatctctgtcagcgcatttcgtttatattatgctctgcgttcgcaacatcccggctaccaatccagcctgaccaaggatctctttctctgatttcaaggtcgtctgcgatcgcatatgcgcttacgttctttcccctccccccccctcccctttgtctattacctggctttccaagtccacgctttagctattcgcgctcttgggtctcatcatggctccaggcagtgggcgcgactttaactgctcgtgggagcattgtgcgaaggtgggtgtatctccgcgggctctactcgtcatcctctaaccggtttagtccttcaatcgcaaatccgatctctgtcgccattatcgcattcacaccaatgagcggccgtatcattgcaccgtaaaggactgcaacaagagctttattcagcgcagtgccttgaccgtacactcgaggacccacactggcgagaagcctcatgtctgtgaccatgaaggctgtcagaaggcattttcagatgtaagggcttgaatctgtatgtggcgcatttactccatttactaatttctatagtcatccagtttggcccgtcatcgccgaatccacaccggcaagcgaccatatatatgccacgagcctacctgcgaacgcaggtaagtactctgcgtggaaagtcgacagcgctattctaattgtcttgttgaaactgcagtttttgtcgcaagaccaccctcaccaaacaccaacatcgctctcaccccccggggagcttgacccgaccatcctcagaagatgcgacctccgagcactcgtaccaccaaacacccgtgccggtctcgggcccaggtgagcagtacatgctcggccagcaaccgtattacccgcaatcggcgacgccgagccatgagtattactcgccacagagtgtgccgatgggctccgtgccggttcacgaaactgcccctccgatcgtgccgcagcctgtacctggatcctcgccggtaaacatgccacacccgcaacagccacacccgcagcaccatgcgcatccgcagcaccagcaccagcagcaccagcagcaacaccaacaatatctacagatgatgcaacagcgttacgagaccagcccgcgcgccaactacctcccagaacaataccaacacccgtcttttcaaggccatcaactgccacccgaacaaccaatgatggtttcataccacccaaactatgcgtacaaacccccaggctcccgtctcttgaaccaagccgaagggactgactggggctttttgggagtaggctaagacgagactccacctagattgtggacccaatgcgtgtttaatgcccgttacgactttccctgctttctccggctgtgtctttgcttttttttgcagatcagaaatccgcatatgtttgtttctggttctggttcctatctctgctccatttctagggttcggcgctttgattatggattcccccttcgatattatgttattctttttctatatattgtcattttaaacggaggcaaaggtgttacccttctcggcgaatcatttttttttgatacctgaacatgggatgtttttttctttcttcttttttctgttctattccctacccctgcgtgtattggtcgtaagacggtcattccgatatcgcccaatgatatatcagcagcagctagttgtttcccaggaatattactgcgatggaaactgcactctgattggctccaggacttagcctttgaacagaaatcctttccacatcgtatattcacttctcttctcagcctctcatattatcctacatcctcaaactagtcctcgaactacggagtacatagttcatagagcatcatgtctgattgatcgaaataaattacatggcatgactcgtgggcttctcgattccttctgttccaaattcttttcttttttttttttttacacgcggtggccccattttcctcggaaagccaaggacagagccaagggccaagggaaattcgaggagcgcaaccctgtctcgctaacaaagacgttttttgtcgcactcgttttcgcttacccttctagaatcggtgacaattatattgattaatattcttttttaggaaggacacttcagagatctagaaaattatttccatgactctctactactgtctaactacaacatatctagtcacagtatcatgatacatttgtctgcctgcaacaacacccctgtagaatccattcggccccttcgcatccccgagatcccgaatgcaacagcaatttgttttatccctcaaacatactccgtagttacctactagatgaatcctggtggatatctcggtagggatctatctctaccagactactccaccaaagcggatacggactagttccctgctctgcatagttattgagtaaccgatttcgattcatatccaacgttgcactctgtctagaacaatatcgccactggtagcaaatcaaaatatcagtcgacagctccgtgggggtaccgggtccagaggagtccttggttaactagtgtgttagtattagtgtgttagtttagtgtacatggctctggccctggccctggccctggaaaggccttgtggcgaacaggaaaatttctctctttttttttgaacaagggtctgtttgcctttgccgcttctcgagacgagacgagaccttggtgagacacctgcgtaccagggagtttgtgtaggtttgcttgattgtatacggggttgggttgggttggaaggtacgtacaaggtacttgggattcattggcatagagatatatatacgacgcagccaatcagaatcgaggaatggaggggaaatgccaggaagtagatttaattcgaatatctggcccaaaccactgaaataaatgaattaaaagagcattcgatcggacgagtatcccacgccattgtacgtagtgccaaatatcgacatccttctattcgactatcgcctgcagcccgaaaccggttttctattgggttgtcaggctactgtaaggctctcaaactacaggcggataccatttccgatttgaaatagaatggattactacaacctctcctcctgattgtctgccgttttacctccccttttcgttttcgcggagatctctttccctgaatattcaaacggagtctccggacttttgggcctagacactgatgcagatccatacagggggggcagggggaagaggggggaacaaagccgtccgagagtggggagattaaaccccggtgaacgtgtggaatgtgaaagggccggtagatcccgcctccagaaggatcaccaatttatttccagccggaggagaataaggacacaaagacccggcctgtcgggccttttcccggcggactggatggtatgtatgtatgtacctgcgcactgttccggacgctactactctatactactctataatctatgtaggtggacgcaaaaagcctcatattacttcgagccgaggtgatctacgatttatctcgtatactagtaacaatataagtgcctccgtgggcgtttcctcgtgtttttctcgtgtttcatggggtcgcccctcccgcatgcaagtcacaaaactaactacgcaaactgggcgttgtgctagccttcaaaacggggtctggtttgactagttgtctccaataccccccaatcgtggaggcttgacggggtcccgagagttgttcatctcgcttctaccgagtaccatctgagactttaatttactgatcctagcctagctactccgtagttagtgatgtatactagtattcattttatctccctccaatcgatctaccaaatcacaaagtggcgctcccgtcctgcgatggggcccaacttcccgagtcgccatgcaataactataatatactagtattaagtaagtaaggttggactccgtgctccgtaccctgtaactccgtagaacatccgcccggcgaatgcaaatccagacttcggacgatgatcaggactggaaatggcattgggcgggcgtaccggagtttcaagttcgcttaacggggcagctactcccgtgggcgcatatacattccctggcaagactaggatctaatctaatcgcttgctggggtatattgtatgtatcaggatatggatgggctgagacggaatatgagcgatggtgattggttcaatcttgcgtgtatatggtggaagactcaaattcgatggaacatgcaatcagaaaacgaaacaggctgattcaccgaatcgagaaatcacataaggcatgatatccagcgactgcccaatccaagccaagccttttttcctcgtatcaggctactcggccttgatttttctccaggggcaggcaatagatggaggacatcatacgagcgacatcgaagcacagcagtatttttgaaacctattttgcaacaagcgcaataccggagcagagagaaataggacaagaactgcaagcctcaagggttggaagggaagagctatgcgcaactatttccgcttgtgggttgatcggctatggactcatttcctgattacaatctaatagttatagttggtataggagagtaaataagtactccgtactccgtaataagctccgctgtgagatccctagggtcggtcctaagagtcggtgtgggggtattctctaacggcgatctaagggggattaggaggatggacccacccaagctggactgccgtgtgaatattcagagctcgatacataatagttcgctagaactaggaataggatgtgtagttatcatggatatccttatgttgtatattgtatatggtgtatggctactgaggttctggataggaaaatagaagacgacacagaatgttaactatatagctagtgtcggagttaggacataggctatttcctattccgcactccggagtactccgtaaagcaaaagtaattaattagtaggcgccgttgcacggagtctggcttgccggtgttgacgcggggtggagacgtcagcttttaacttctttcctaaaggggtatgtagtgtgtaagaacccctggtcgggtatttatctgaatcggggttatttctaacctatcgaaaggaagtatgtaaatgatatacgtacttgcattctataatatactgtatactctatacggtaactacaatatatactatatactgtatactcactatgtatgtgtatccaaagtcaggagcttgggccttcgggagcaccggggtacacggcacagaacctggtaggtgcgggtatggtattgtcacaacgcttgacattgcggacgctatggaccgttcccgaaggtccactggaccccggtactggtgtattggaacggtaatccagtatattatcgtactgaataatcgaccgaaccacattggcccaaaagcaaacaggaaagaaacacttggcaaatccacaatgtaacctgtcgaagacaattcgaaactcacctcttagccggtgagtttctggttccatgtggtccccgacaagacctgcaccgtctacatcgggcatggtaagaaaagaggagtccaaggagaagtggagtatccagttcgattccattatacataatgtgagaatccccaactcatgacatattccgtctggagtcagactagcctgatccatgagacctcagaaacaagctttgtggaatggggtagaggacgcgttcatctcagatcggggtctatccaatgagttggacgcgaggtcgtttccgaatcgaggtgatgtccaggtacaatgaagccgtgggtcggaccttgaaatggtaagttggatacgagcgatcgacggatttcagtccgttcgggtatttttgcggctcaggccgatctcaaagttcgaatttggttttggaaacgacaatacaccgaaaaaaacaccgaaaaaacaaatacaattgaaattaccgctcggctagaaagtttcgacattctaaaattatatcttctggaaaggagttcgatgaaccagagttcgtattcaaggtatgtttggtctagattgcgcgggatccatagatcagcatcttaaagtgaagctatgtgtgccgaggagatacaacatagacattctgttacatcagatcaacccactctatctggttcttccaccctaaggcgtgctaaccagatctgcttccagatcggatcctcgttttatacggtttctatcgtgacacgaagtcgtcttagtacgagtagtacatgtccgtcaatcaagtccgaatacaaacaaatcatcacctcagcaataaaatacaggacgccatagttaactaactagccatcccgcaattctcacagatgccccaggcactcagcctaaccgcatctggaaactttagacgagaataccggcgcctatcacagtgcctggggaagtgtgtatccgtatcatgtccatatccatatccacctgggcgtacaataacttactcctatcccgtacagttgataataatatagttgatcttagtgtacgacgctggtaacggctgcgtttataagccttttttcgtgcgacgtcatccgggctggataaagatgttgtaccatgtagaccaggttcctatctaggaatagctatcctggcacagatacaagatgataccagtcttgcattcccgaggtaaaggctgatcggaggtttttggaaatgggggctgatgtggcttggctggggaaattgggtagctagttaaggctctcagtagtcagaatgtcagagtcagaatgtcgcgagcacatggtgaatggctttttgaccgaggctggctgggaggagattgggccgttgcgatgttgaccacccctcctcggcttgaacatgagcagatacagtagttacgtgatatcggtacttgcgtggtacatgcaatggcgacctcgtgttccgttatgttaggtatggttattcgaaaaaagacaagacgcagtctgaaatatgtgcatgaatactctaatgtagcttctctaagcctttctataaacccccttccagctaccagccgagctagcaagttggtgttgacacaaaaggtgaaagtaaaaggcctactcatccgcaacggcaacctcagcatcccacttcggcgcgcccatcagacgagcacgcttaacaacacgctcaataccatcaagaccccgcttcaacacatccatcttaggcccgtagctcagtcgaacgaagtggtgacacgggctgtcgaagagatcacgacgcttggccgggttcaagtcgaagaagataccaggcacaacgatgaccttctgggtcagcagcgcactgaagaagttcagaccgtcggagatgttagcctcctcaggcagagggggttcgatggaagtcagatcgagccagacgtagaaggtcgcgccggggacgtcctggacacggaaaccgatatcgtacagacggcccaggacgtaatcgcgcttctccataaagtgctgctgcagcgccttcatctccgtgcgcaccagccacggctccagcatcgggatcgcggcttcttggaatggcacgttggcaccaccgtcgaggtacgatcctgcggaacctagggcgtcgacaaaatccttgggtccgaccacccacgcaattcgccagccaggaaggcggaaccgctttgtgagcccatcgatcaggagaacgtctgtgggtccggttagcccatgatcaaaaattaggttttcggcgcgggtatcgtaccatccttgttaacgtcgacaacgttcgatgcaccactgattgttgttccgtcgcagcccgttgtgtagttgtatccgccgtagaactcgtccagaatcagagtcgcgcggtcacggcagaggtcctgaatttgttgcagctcgtcttgcggcatgaagtggcctgtggggttacggggattggaggtcagcagcacctgggtaccacgggcgatttcctcggcgatcttgttggggtggatgtggtagtggtcctccttggaaagaggaaggggaatgggcgcaatctgcagggaatcagtaaacggcaacatttcgggctcagctcttctaacgcacgttcttgaacagagacaacatctccgagtacgcagagtaatcggggatggggaaggacagatacgagtttccgagaatggcagcaatgcgaatcagacccgcgcggccacctgggacaatgcagacattctcccaggtatactgactctccttgccctggcggtagtggtcgttgtacagacgagcgacggccgcgcgtaatggcttgataccggcggtcgggccatattcccgggaagcggatgtgatgggaatagcagttgggcgagggaaacttccctcgatgccgtcgtcagcctcgggggctccctgacctagattagcccagctggaaggatcatcggcgtagccatgctcgcaggctcgctctgtgcaccagacgacaccggtggaggcacgggaagcgtcgagaccggcgtggggacggtgaccctcgtgagcctctcgaaattgccgatgggtttctgagttgagctctgagggtttccaaagttagaaagctagaaatgtcagaaacgtgtcattgcataccgttatccgacagttccttcttggccgagggattgcggttctcggacgggcgtaggatgctcaggcggcggccggagaacgacattcttgcgagtgttctggtttgattataaaaatgattacagcgcctttcttataagaaaaatagggaactctcggaagtgggaggggcaaaagtgaagaaaaaagtcatctgcagcgagccgggtctcttttatagaaggacgcaaaggccgcttgccaacacatactaggacgagcacaccgactcgactcctattcataattccctcaatcctcaggggcaacaggcgctccgcgcatatattaatagcgcagaccaatacggtgtgatcttgagatatttcctatttagtcttttagtgggcgatcttccgaatagtagccgggagtgccggaactacgtttcgggtatcatattcagctgctactataaatatagctattcccatacagagctatagcacagagctatagctactccgtatacatcgtagctgtacggagtagactaacctggccttgccaagaatatcggctatccgacctgctccggcatcccgatctgataggcatcccgatacggattataggtctggtatagattccaccggaaatataaaaaaataggcatatacatcatatggaagcttcgtacgttcgtggacattgagatactagtagatcagtaaagagataacaatccgcgaaatgggaacgcaaaatcagaataaaaaaagaaacgggacgtctttatcccttcacctcgtcaccaggacatcattcatgccgtaaacaaatcattagatgctcgcctggagacgccacagtccaactacatgtttgccacggcgtggctcgctgaaagtcacaaagaagaaggggagatagaaagaagtatctcccccgagaacggctgctcaacagtttcaggccaaatccagttgggtaataagggtcaggatgggagaacgagcgccacaggcgatgcaaagcattgaaacgacgaggatcaatcctcgccggggggaatcaagggagggtattaagtcaagaatgagcggaaagcaaacaagaaaacgaaggatctaatcgaccacctggcagtagagttgaatctctcccaccaagcccttggcgagcatatcacgatgttgttcccgccattccaggaaagcgagctggaccgcctcgtcgctatcgatcgtgacgaaatcaccgtcttcatcccggtagcgcagccggacacttttgctcccgatggatcgatcagtgaaccgagcgagtttggcatccacgcggtccgtcaatgaccggaacataatgttggtcgcaattaccagcgtgacatagttgtcctcaaaattcaccttggccttgagttgagtgggcatgtagtctccttcctctggctcttgggtcaggggcgatgtggcaggatccgagatttgcccagaattgcgggtatcattatattccggctcgttaaagtgcgtcgtgtggagttggggctgggtacgaatggggagctgggtgttggtgggcgaaccgttctggctgcggttgacgggggttatcatgttggccatgtgcgcagggatcgggggcacggggacattgtcgacggtctgcatagtgtgcactcccatataacgccgtgactccggattgttactgtgatgatgaatatcagggctactagccgatcgcattcgctgggccatgccatttgcgtgagactgcgaggctgagagtggaggcaatgacggacgctgagcacctcttggaataggttgaggtgggaaatatccgccagaggttgttccgtcccgcgatgttacacgagacaacgctggtgctgtgtagcgaagggtatcctcattccagaccgatgattgagtggtggaattggtattctgacgactgaaggagaaccctgcggattgagaactcgatcttgtggaaggagtctcagtcgtgggggaaaagtaggagcttacgtttcgatcaccgggggacatgcttccgctcccggggaactgagtgtgcagcgcaatcgttggatcggttcccgcatagcgcggtcgggtattggggtgagcagcagagatggagctgccattggtggcagatcggtttctcagactagtactggacggatttcggctcatggggaattcggattgatatggatctttgttgctggcatcatcggtatcatactcttgttgataggggttgggaatgtgcggcatgccctccatgtacgtgaactcgctgtcggatgtaccagtattgcgcatagtgcgtcgctccgcttgaatcacccgttgggtgtcaatgtccttgtaccaagtccgcatggtgttctcgttaatatatcggatgataaaattgtcaacgacaccagggtctcctttccagaaaatctgaatacgatagagtcctgtgtgaaccgattagaggtatttttcttaacttaagaagccaagagtgatccttaccaggcttttgaagacaaacaatatctgtgacgttggccatgtagattcgacctttcagttgaagacgagcctttcctttcgcattcaaagacggcttatctttttgcatcataagcttagacttttgcttgttgggattgatatctttgcaacagagaagtattcgctcgaagagatagatatggtactaaaagccatgttagtgacgtgccatttcgggaaacaaaccataggatcagacagtacctctctttcgctatccttaccactgtctcccttgacaacttggaaggtaccaaatcgaagaagatctccgaatgactccattttcaatgctttccagtcatccacgcgctcggataaatcaagtaccgccgcagtcaaatgttctttgtggattgcctcgttagcaaagtccaacacagtctggatgcaattgactgcacgcgtgatatcggcctgcagttgctcgtcttctaattgtttgcgtagctcctgaaaaggtacagctatattagctcgttggtcttggacctagcattcagcaaacttaccaaaagcatcagcgggtatcgagtcaaacgctggaagggtttcacaaagaatccattgagcgttttcggctgagcgaccatttgctgcagatctatatggcgtggcgcactttggattttgtcccagtccttcatacaagcttcatcacaacgcatctggttggcaatgaaaggctcatactgccggaaagcatcttcatgcaggaagaaaaggtgaccccagttctgcatttcttctggcagggcgtagtgctgctccatgcgaatcaggaatcgttgggcaaagtctagtaggttgtttaaattgaggaaaatctgatggctcgcatcacctgtcaaagcacctgtctcttccagttccttcttgagcgcttggagattctgcaggtgatgaacataatcacgctccgtctccaaaagttccttgaggatatgctctcgcttggtaagcttcacattggttttcgcgctgggagcctctagaacttcggattgctttagttgaccttgcatctcgagtatgtctaccacgcggttgaccattttgatcactttgatgaatccagtggtactctcgccgtaaaggtcggtgatcaaaaagcaatcctgctgagggaatgccagctcttgtaaacaggcctgtaggaacttgaatgtcgccgctttgggacgcttcgcctcagttaccttcccaggatcaatttccagcggctcgtcgggaccagatgcattatagatgctcaatagtggatagccatttctgagacaattccacaaggaagccaccggatctgtatttcctcttatgcgatcatcatcatccatctcttgcaagtatgactcaaaattgggaacttcggatagccgtcgcctcagattgacacagctctggtagatcgattcgccaccacggcggttgatgatgttatcctcggcgaccggagcgccgctcatggctgaagagtcaatcatatctttcctcgggggccagatatagatgagttagaccagccaggctcaacttaaatctgcacagcagacccaagagggataggttcggaaggatcgacgggcgtcggaagtggagagatgacgatcatgagttccccgggggcgtaagctgcgcggcgcagggggtgtcaaacgagagtttcgaaattccgacagcgatccgatcagttgtcgtaggtgtgatttttgaaatatacagatcccgggaagcgctctcgagatcagagatacctatatatttgttcgaaccaatagcgcgaatatcaagtacgatgcaccgtaacttgaaaaggaggggctcgaggagtataatccgaccttcagccagccccaatcgatggggtttggggattcgagtgtttaaaggaccgctgcagccgggcaggcgagtcagatcaggtaaaagagaatttggaggaacacctttgcgaaagggccagtcactaggacacgacggaggacaatcgaagtcccgagaaaaagggggcgcacggaataataggataagagaagccagaacaagaagggctcggtagttagatgaagtcaataaccagaacgacaggagcaagcacaacagctgagagttctgctgatggaacagaggaatagggatccttggggccgaaggagtctggtcagtttcctcaaaaggtttagcgtgtgttttatggggcggtgtggtgtggagaggggcagctgtgtcagcagccctccacctcccaaggttgggggtcagggctgggcagcctaggccctgggacaaggctgggaactggagggctggtgatttggagctggagagagctagggctggagaagagagctaagtgatgctggagtagttatgtacattcgtaccttttgtagggggcttgcatacaaaaggtacattcactgagatatatacttacacctgcactattacaacctttctgccctcaaacgttagtatcccctgtctttagcgcctaggaatggtccgtgcaattataagacagttctgattttgtcggttccctttgtgacatagcactatggagtatataatgagtgacctagttagtattttggaaaatgcaatcggtactatctttttctctctcacctagacatggggtttctctttaatcatagccatggcatgaatggaatatgctatatatactacgagttgttccccaacatatttctacagtaatagttacaacactacataagacattgaggaagcggctcattatggacctcctcgctcttatctgacacattgatcttctacaacgcttgcttttctcatgaaggagttagatacatgtagtcatgtaggttttgctataattctatgagaaatcctacggacacacccccgctagctacttcaggtatctccaccgctggccacaattatcaataatatatatccctacagtattctgaacacccgcgccatgacaccattgaagtacctttctatacctatttagagatcacctgatctacactataagataatctagattaacaagaatactagcagtctttatatgtcttttcataggcataaaaaagtacttcaatggtgcggtcgggttatagtgatctacacaacatggtggacaattgcggccggcggcggatatacccgaagtagctagcggggagttctatactcgaatcacgtgactcacgggggcaacaactataggctcttgaggatgactctgtatttagatatagactctactgaaattctacttttcttctgtctcgaatttaaatggaatatcttccttctattcagtttgcgactgaagtacgtgagataattgcgctctatcaatcaatctccagggctggtgggccttgcctcgtccaaacctgacgtgacatgcaccgaggccaacccatctgctcaacctccttctccttcctttccccacaaccttcatcttgcaaaggaccttacctcatttattaattttctataatctcttcacggaaagttccttgcaggatttcacagccatcgcgcgacgccattgatttcggcgttccattcatcagcccggcgcagacccctctgaaacccgcatcaatggagggcgagcccttgcccgatgctcccgatgccgccgatgctcgaatctcccctacactgcaattgcagacgactactgtttccgagttccccgcgctttctttgtcaccctcgtttaagctagatgaaggctactcggatgatactcgaagccaggccgacaaagacctgggatcggacaatgttatggcgcttccaagttggttgctcgcccagtccgagaccggtagagctggtaagattaccctattccccttgccccctgtggtaattgccacgagcgcgaagcatcagcctcttgctcgtcactttgcgattatccttgctaactgagggttcacgactcccagaactcgcatacagccttcttcggtctttaccaacttcgagcatcgcggcagtagttgatcgactcaacccaatcttccatattgacccatgtgtcaggcttcccccggaagtcacatggcaggtttttacctacctcgacgcccggacgcttctgaatgcttcgcttgcatcccgctcatggcgtgaacgtatccttgactcaggtctgtggaaattcaaatacatccacgaaggttggggcatggacacgggcgcaattcgtgcgtttgaacaagaacattccgaggccatgtcgccccagactcggaagtctcgcctacgacactcggaaccagatctcggggaacctaagcataaaaagcgcgtgccgtcgacctggctcaattcccgaagcgatgaaaaccaaaaaccgaccgtgtttggccctgcactcccggtggccgacagtgaaggtgatcaccacatgactgatgatgacgatcagactacaccttcgttcgccgacgacccggagttgattatgccaaccagtacctcccaatctttttcgccactgtacccacctctacgatcgcatcttctcattcgggataccgacggaagcgccaaggtcaactattttcatatctacaagcaacgcaggcggctcgaagcaaattggcatcaaggccgatacactaatttccaacttcctgacccgtctcacccagaggaggcccaccgggaatgcgtatatgcgatccagtttgaaggccgatggctagtcagtggcagccgagacaagactctacgagtctggaacctggataccaaacgactatggcatcccccgctggtgggacatataaagtccgtactttgtctgcaatttgatcctcgacccgaggaagacatcatcatctctggcagcagcgacaagtctgtcattatatggaaattctccaccggagaaaagattcatcaaatcgaagacgcgcatcttgattcggtgctcaatctcaaattcgaccatcgttaccttgtaacatgttctaaggaccgaactgtgaaggtatggaaccgccgagctcttttaccgaatagcaaggattatccgcatctctgccatggatcaggcgccacatatcctacatggataatagatttgaacacgattccaccgagtgttctcgaagctggcattgcgcatgatcaatacaaagtcctagagccttacacgttgcttatgaccgtggaaggacatggagccgccgtgaatgcaatgcagatccatggtgatgatattgtgacggcgtctggagaccgtgttatcaaggtctggaacatccggactggtgcttgctccaagtccttgctgggccatgagaaaggcatcgcatgtgttgaattcgacagccgaaggatcatcagtggcagcaatgataactctgttcgcatctacgatcatgccaccggagccgaggtggcgtgtctgcgagcccatagtaatctcgtccgcacccttcaagcagggttcggtgatgctccgggagccgatgaaaccttgcgtgaagaagcgatagcgtgtgaaactgcgtttttcgccgctcaagaggccggattggacgtcgacatgggtcatcgggagcaacgccgcaatggttaccaaccgaacacggcgggatcgcgggaccctcgtgatatccctgctctgggggcaaaaattccacccggtgggggaggtagtagctgggcccgtatcgtgtccggttcctacgacgagtcaatcttaatttggcacaaagaccgtaataacaagtggacaacggatcatcaactgcgacacagtgatgccatcgccaattccgctcgtgcgaaccttagccaagtggcaagaaacactgttgcggcccaggcccaggctcagcaattgcaagcagcacaggctctggcgacacttgggcaaaatcccaatatcaacccccacgctggtcgtgccaacccacaatttctgcctcctctggttatcaatgccttgccactcgctccacttcctgctcaccatcatcaccaccatggccatcaacgcagacctcaagggtcctcgacagctgcgagggtgttcaaactccagtttgacgcacggaagctcatttgtgccagcgtggaccctcgcattgtgggatgggattttgcctgtgatgatcaagatatcattgaggcgagtccattctttaaagggctttaatctttccttcgcctttacgctttttaatactagcacctgttcttcttttacttcagtgcatctcctgcatcgtcctcactgggcgcgaattgtgagccttccaatgaacagacggctcaattcacttgacgatttcctattattagcatccatgcgatcgcggtgtgctttctttgcctggtgcattactccttgctctcccgcttcctctgtctctctccgtgtcctcttgtcctctccttacccatcttctcaatgtcgtgtcatatacatacgatgggcccttgctttccgtttaatggtgcatttcttatcttgacttccatattaggagtcatttctggctatccaggtcacatattctttccagagtttttttttatatctcttcgatctcattattatctttcttgcatggcgccggtgtggcattctatccatagcattatgattagcatcaatcagaaaccttcgactaccaagtcaatatcattttatggatatcaagccacggcatactcgcctcggtttcaattggaagtaggccctgacaggtgctgttttatagtactgcggcaccaagtgctgcagcactcccgcagcactacagtaccgaaccaagattactcaggtagggcggtcaaccgatcgcgtacccaatcctccggcagaaaacggaactctcttacgtaagcaacaaaagtggggccgagagatcgacgccacgacccgctccccacttggcttctatcaattctatgcaatacacccttccaaatacacctttccaaaatggcaaagagaaatcgatcagcttcaccttccaacacgccacatgcccaacgagctatacgtcgattagcaagagtatccccgcccacagcaccccgcggactgtcaacactccctacagactcactgaccagcttggagaaaggcgcccgggagcacgtcgatacagttgccttcaaccctcgatcaaccggaaaggcgtgacccttcattcggcgcacagttccaactgcgggacaactatcgctgtgtgataacgggtcaactgagcaccgatcaatgggagcacgaaggggaaccagtggtcacatgctctatatatggtgggctatatattggtgggacccagcagaagtaacttacctttgtaaactccccattacaatctgcctctacttttttcttcttcataatagcaactatttttctcgtcgttctcttcctcggcaaaatgccatctggggattcagctgtaagtgttgatatctccaatacctctctgtcagacttctattataaccatcatcctcattaataatttgttgggacgtttactgatagataaagaggcccccattctgcgatttctgtcgccggcgtggcgatgatgaatgcgacttctattacgtcgcgcgtaagacccatatactcatatcttaaatagaggggagatgttaattttaggtgacgaagcagactaaagtcccaaaccccgtaagctacgctacggctcccgctcgaaagaggccaagaagggcatgtcgtgttattttattatatcgagctacccagtctatgatacctcgcacttgcctcttacttgcctaaggggcctcatataacaccttttgcgtttatctcttggccaggcgtatccggagctccaagagatacatcaagcccctggatctaactgtatatgtatttccctgcgccacaaaaaatactgtcagcgaaggagattaatactcttcgcaacgggatcactcttcgagactcggtacatacccagcttggcaaatttacaattgccttgaagcctaccgtaagcaggcaatgatctactatgaaaccatttatactcactcttcttattaggacatgggaaatgagtacgaggtaaagacttgcaagtgctatcccgggctgatatcccaccattcccccgatcggcgcgtccgatttttaccaaacacagagtataagattccaagccccgcaattctcgatgcgcattggagagtgtgcgagatcttcaatgcatctgcgatgggagagaccattgaacgacgtcttcgggagtgggaagggttgagaggctctaaatgcgctattattagagaggacggtacgaccgatctcgctagtctgctggatatcgcgctatggggccaagtttccacatgaatacacgctttacacttctgtattagtatttggttaggtctgagccaatcttaggtttatgaagccaccttcaattaccatgttcaccactcttcatgtgagaataccggtgatcgatcaaagaaaggcaaggcacatctcgagcccactttcgatattggatctgtacaccattcaggagtagagaagcatacaaaattctaatcagggacgtactcaaatttactctgaaatcaaaaagcggcaagaggtgagcacttaaatagaaggggaaaggtctcgagtgccaggcattgtctggtacattccattgtagcaccagatgcaagatatgaaaatgcatttacaatgacatggcaagggtgcaaggagataaataaaaccatcaaaaggtagatacctgcacctcgttagacttactgatcatagtatatgtaaccgaaaaagaaaagaaaagaaggggttaggagccttagactgcaggaaaaagaggggaagatacgtgcctaggtagcttaggaagactagcagggatatcagtaaattagtaaattcctaccttttctgcatgcaatttcctgttttattttccctcttcattctgtatccgacttctaatattcgcaatgtcaagcgagaagttcaccgttactgagcatcttgtcccgggcagttatattagagaatacccagggagcaccgtcatgcaggaagatgtactgaaaattcatgtcaaacaatatacccccaaacacgaaggtcccgtcccagctgatgcaattactttcattgccgctcatggagtcggtctcccgaaggtgaccctgtctttaacctgataattcgtctcatgtgctcaacattggacacaggaactgtacgagccgctgtgggacgagctgctggaacgaactaatggcttccacattcatggcatctgggtggccgacgtcgccagtatgaaccagagcgggatccagaatgaggataagctcagtatggattgtatgtgcttcccattcgattcttgatacatctccccccatattaacaatttcctaggttcttggatggatcacccgcgagacctcttcttgatgatcaaccattttcgtgagcagatgccacgtcctctcgtcggagttggccacagttttggcgggaatatcatgtttgtgacgaataaccctctcaattttgagaattcaaagaatgagatactgatttctttttccagcacaaatcttgcctatctacatccacgcctgtttacaaccctcctccttatcgaccccctcattcagctaagccctccctcgatgggcttcggcaccgaccctccaggcccgatcaactacactctctggcgaaatgacgtctggcccagtcgcgaggcagccatacgtgccaaccgtggcctcatccatggctgggatcctcggtgcgtagatcgtatggcgaaatacttctttcgcgatctaccgacaccgctgtatccggatgtcgaggccgtgaaggcgcgctttgatgcagccgctgatactactgccactccggtcaccctagcgacgccgaagtaccacgagcttatagcgcaaatacggcagaacttcaatgcccgggacccgaccacgggccggatcgaaatcccacgagccacccatgccgatatggacccattggtggcatctattcccttataccgaccagaacctcgaagtacgttccgccgcttagggacactccggccttcatgcctgtggattgtgggcggggcgacgtttttgaatgtcgatgagattcatgaaggtgtcaagatatgcgggtcaggcatcggcgggagtggaggtgtgtctgagggaagagtgaaagaggttatcttacctggattggggcatttgatgccatttcaggagattgggactgttgtagggccatgtgtggcctggttacagcaggagatgaatcgattccggcagatggagagggagtgggaagaagaaaggaaaggcaagagtcatctagtgctagaggagaactggtataaagtcttaaaaccaatgcctagtggacgtggtaagggtgggagaaaggaaaagttgtagatactagatggtcaaatgtctactttttcaattttatgttatcgagatatcctcgtaaaacccaacaacccttgattatccgtctacatctccacagatcgccttacattagcaatcaagtgaggtctagtgcacacgattgatatgtcgctggatgtatgccaaggccagggtggtcctggagaaacccagcagacgacatggcgagatcgacatccttacaataaccccgcttcccacaccgtttgaattatatctctcattctaaccagaagtttcacatcagctctttcatataccgtccgtttaccgtatgtaactttatatgtatgttgtagatcccaaacaaaacgtacattttcattggtccgtagcaagggtaccgaaatgggggaggttacccgacatatgcatgcaggtgacgttttgattctaaaacatttgtaatattgaatagttgaataatagttgaataatagttggataatagttttatatcctttacatgtatttttacccaaagatacctcggatcggatttcaacgttccgtccgacccaaattcgacggaaatttactagaacaggattggggcgggtgacctagcaccagtcacccgccttacaccgtattaccgccccaatatttacatgtacatacaacatacatggcccactacatggcccactacatggcccacttggatggaaatttcatacatacacgctaaaaagagcagagataaaaatcttttaatttaaacctcagtcgtattgtcaaaactagagaaacttgaaaagtactaggcatcatggcagtaacaacgaggcagaccaaaaacatccatggacagcccccaggttccacctagcgtcgactatacatcgaaagaccccgatttccgtttaggatggcatgtgagaggctttggtgtcgccagccacggctacaaatataataggtcatcttccaattttaacatgatattgtgtacacctttctcccatattctctgagttgaaatcgttcatcaaaagcaccatgctcaccaagtctgtgacctccatcctccaagggattaccttggcagccaaagaatttgagaacaatgaagctggtgcaagagaatccctcattgctcatagtagagctctgatatccgctcttgaagttccgagcgagtttattcaacacactttctggtctcaggtaagcctgatttggcggggtaagactcgaaactattgctgatgttcatatagccagcactgtctgctattatcaggcttgctgctgatgtcaatatgtttcaacacttgaaagatgccgcgggtaaggggatagattgtgaagctctgtctatgaagacgggcgttgatgccagccttctatcgcgcttggccagacacctcgtggctatgaatgtgattacgtttcaaaatggagcattccatggcacagacctgagcgatagccttgccgccgagaactatcaacactccatccgcttttgtcatgatgtgtccaggccctcgttcaatgaattcccggaattcttcaagagcaatgggtacaagaccccgacgctgagtggaactgatggtccattccaagctgctcataagactgagctcacctttctgcaatggcttgtcaacacacccccctatctgcagtattttcactcttacatgagtgtttaccgtgctggaaaaccaaactggtgcgacaccggtttctaccctgtctcagagcgtctcctttccgggttcgatgcctctgtcagcgatgttgtgctggtcgatgtgggcggtggtcgggggcacgacctcgagacttttgcctctaaattcagtcctcttccaggaaggctcgtgcttcaggatcgagaacaaaccattgctagcatgccggccgatgaatcccgccaatttgaagcgacggctcataacatcttcacaccgcagccggtcaaatacgctcgggcgtactacatgcactctgttccccatggcttcggagacgaggatgcaatcaagataatgacaaacctagtgcctgcgctggcgaagggatactcccgagttcttttgaatgagattgtcgttagcgaggagaaccccattctagcggcaactaatatggatatgattatgctggcccacttggcagtgaaggagagaacagaagctgaatggagatatatcttcacccaggcgggattaaaggtggtcaatatatattcgtatccaggcgtggcggagagcttgattgaagcagagctcgcctaaacgtcaccaatttctataggttggctacatatcgaggaaatcagaatcagactcggaaacaatataggaaataaaaacccgaatcccgaatcggcaaatctaggcttcagcctcggaaggttagcgcatttaaattttcggttctgtggggccggcggccgcagccctactccctacggtatcccaagtttaaacctgtaacaaaaacgcgttgtttacggagaagtccgaactccgtaggtaaaaatccttctgagggattaaaccggtcattgtgggggtgtagatcatcaaaagaaagaaaacgaaaggcttttcgctaaaattcccctgccggagtcctctttgattggactacagtgtagtgctgcgatgaaagagggagagagttgtatttccagttcttgtatttcctgaagttggtgcctgccgcaccggactgatggtcaggtgacctccacatccaacaatcttaaaaggccgtccctcccctgcccctctgacttcctttgggaatcacccccccattcccattacctattagttttttttctattttttttttttttaaaatcagcatcatggtcgaaattctggattataccaaggctttagaagtactcaaggagtatcctggagatggcctccacgtcgatactctcctcgattcggatagtcatggagctttgacttacaatgacttcctgattttgcccggttctatcagtaaggcaatgaacattatctcataggtcgttctctctaatcgtacgaacagccttcccggcatcggatgtttcgttggaaaccagagtaacccggcggttcaccatcaaggcccctctactgtcttctcccatggacactgtgaccgaacacagcatggccatccatatggctctcctggggggtctgggtgttatccacaataactgcccacctgacgagcaggctgagatggtgaggaaggtgaaacgctatgagaatggcttcatccaggaccctatcgttctgtctccggagacgacagttggagaagcaaaggaattgaagactaaatggggattcggcgggttcccagtgactggttagttggatttctccttggtggctctttttctttttgtttcgtttggtgatccttaccttgtttcgttcatagaaaagggaaccctccactcgaagcttctcggaatcgtcaccagccgagatatccagttccacaagaaccacgaggatccagtcacggctgtcatggcgacagacctcgtcaccgcaccggcaggcactactctcgccgaagccaacgaagtcctccggagttcgaagaagggtaaactgccaattgtggataaggatggatccctgatctccctgctctcccggagtgacttgatgaagaacattcattaccctcttgcatcaaagcttccatccaagcagctgctctgcgccgcggccattagcacccacgacgcggataaggttcgtctccagaagctcgtcgatgccggtctggacattgtcgtcgtggatagtagccagggccacagcactttccaaattgctatgatcaaatatatcaagcagaacttccccgacattgacgttatcggcggtaatattgttacccgtgagcaagccgcggcattgatcgctgctggtgcagacggtcttcgtatcggcatgggcagtggctctgcgtgtatcacgcaggaagtcatggccgctggtcgtcctcaggctgcagccgtacgcagtgtatctgccttcgccgcgcgtttcggtgttcccactattgctgacggtggtgtccagaacctgggccacatcgtcaagggacttgccttgggtgcctcggcagttatgatgggaagtctgcttgctggcactaccgaatctcctggtgagtactttatgagcagtgaaggccagttggtcaaggctttccgtggtatgggcagtattgcggtcatggaggacaaaagcaagagcggcgctgggaacaacgccggtgcttctcggtacttctctgagaatgataaggtcaaggttgcgcagggtgttgcgggctccgttattgatcgtggctctatcacccagtatgtcccttaccttgttgctggtgtgcagcattctctccaggatattggtgtccagaaccttgatgccttgcgtgaaggggtgaacaatggaacagttcgctttgagatgagaagcgctagcgcgcagaccgagggtaatgtccacggcttgcacacccacgagaagaagttgtactcttcttgaatgcggcgtctctgttttcgtcgactgttgtctagagttccttccatctagtacaccagaccaaaagttagtcaatacactctttttgataatctgccataagcaaattgttgtcaagcattttgaaaagcctggaatagaaatctagtgattatacaagatttaaggggtacagagagctcttgaagcatattttttcaaagagtaaggtttatgaaattcaaaattcaaacacatctctacttggtcccttccatagcgtcttcaagatctttgtaaaacagccacttcgtctgcttgccgtacccttttgccttccaatcattgatagtcaaaggataaaagtccatattccctttcaaggtactatcatgagcaagaatcagaaatacattgtcgtatgcatcgagctctttgatattgtcgactgtcttcagcgccgcgtcgtaatcagaaggaagcacaggcgacaaggtgaaaacggattctgattcagacgaaagcggaatgtgacgagagtgagatggacaaggaagatatttggaaggccgaagaacaccggcatggtggcaggaatctccacccatgaatacgaatgagtccggcgaggtggtaacccgcgcgagggcgcctatatgaccaatggaatggcctgcggcatttagaagatagaaggatccgtcaccgaaatagtccagcgcgtcgaacgagcctatcttgatggcttccttttctgtcctttcgaaggagatttcccgcactttccgaccttggatgtccgaattgagattgatcgcgtccgggttagttgggaacccgggccagtggctgtcccggatgccaggaccgacgacgagctcggtagacagtgggaaagtggacgggtcgccgatatggtcaaaatgggcatgcgaccagataatggcttcgatgtctgtgctgcggatgcctagggacgatgcgtcagagtccagaatatccgagatgttgcgcgggttctggatggttgtctgtgatttgatcatggctacaacggatggcggaagtctttcccagtcctgtcgaactcccaagtcaaatagaacatggcgagtgccgactgagattaagaagcagtaagttggcgctgtcacctttctaaggcctggcagttcgggttgccagaatagatcaggtcgtaggtcaaggagtgttcctctgcgattattaggtcaattggttcccatggatacgacgaggtagggccttacgggtcgatcactcgcacatcgacggtcgatgatgaaggaggaatattcaagacaggtggaagagtgggcttgtctttgttactggaacctctctccattttcgcccgcttgcgaatcactgcttgtagtcccgtctgcttgaagaaccaagcattctcggttttgtagttctccgggttgacgatttgtatctggcacggaacaaattaggaagagcacatacctgaattgaagcaaagtactcacatcgtagttcaaaagcagtaccggaattaatttcttgatctcaaggatggcgatattcttccccagacaagtacgacggcccgctccaaactaaatctcaagattagtaagagtatgtctgacgtagacgaagtctagacccacagtcaacaagctattctccagcctcttacggtcttcatggctcaggcctagccatctctcgggtctccattcgtccgcatcattaccaaaggtttctttatcccggttggccatatatgggctgattccgacaatggtccctgctggaagatatgtctcgcaaacagtcaaaccaccgccaggaacaactcgctcaaaaggtagacaaaatggaggatgcagccgtaaagcctccagaacgcacgcgtcgaggtacggcaaatctctcactttctcccacgagggacatgtacgagaaagaccatttctgctctcagattccaggagctcatcttgcagacggctcagcgtgtcccgatgaactaagagattatacataattgtacgcatgacatttgcagtcgagtctgagccagccatgatattagagaaagtccaggctcttggggccctggatatgagttagccggatataaggcaagagatagaaatcgatcagcgggaagatttctttaccaaggcataacatcagggtttgaggcctgtatattgagaaactgggagagcatatccttctcgtctgaaacctcgtctttttcacgaggcgccaagcgctgcaatataaacttgtcgactacctttaacaccccaaaccctgtcggtgacctgaacaatgctataaacgggttcgtattacagaactcgtcaaaccacggaatttggcccatctgagaaagtcatacgcattagaaaccaacggtagcacgacgtgcacagagctagaacccaccacagaaactctcttcataaacttccaaatctcgcccaagattccattcatatcgcggccttgttcgaggaatccatatcgtcgagagaacgtcaatgtccccatcgaatcaaacgcaaaatactggagccagctccccagatcaaacggaacatcgttgctgcctaggaaccgaccatcgagctgttccaacagtaccgcgagggtttgatcgacaaatgactcgagcttcaccacatttgtcatggaatatagaggagcaattgggcttcgaagccttttatgaaggtcctcgtcttgggaattgaacaccgccggcatggcgcccttgtttggcgtgtagggcttctgtgtgcgataaaagtcgctctgggggtagcgatgttagcgattgaaatccaatcatgactgcacgcaataactctggtactaccatcactgaccttgggaaacccaggcctactagggtagatagccgggatggtgcgaggatccgagatagagaccatgtttggaccgaatcgaacggcaggcccatacacagcatgcatccgacggtggtattcatgagctcgtccggactttacccaccacacgcgttgcaggtttgtgaactttgcaaacaacggacctggtacatcttgcagatgcaagtatagacaacaaacgtagcgggtgagatatagcacaacagcaacagctgtgatacgtattatgatcagatagtccatagtatataagtttatgtcttgtacgtatacttgtgctggaggattgagaatgaaaatgaaatagactttcaagattgagatcaatcgtctagtatctattaaccgaatcatattgctattgatagaacaacaagctattggcctaaagggacagagtacatttgcacacacctcgcctctttacacagctggattgagttcgtatcaatacagtttatggaaattagatatttcgtaatctataggcagttgcctaatttgtgccttagtgcatctccacctccaaatctagaatgctcccacatatagccccgcgctactgcgtacacctcacgcgaatcgggtctatacataataacactccacaaaaagtgaagcggactaccccgcgtataatataacatgtgcgtgacattcaagcctttgcatatcttactgcattgtatacctgctccactcgaattcgatatcgattgttcgggcgatcgtaataggatgacggctggctgcccggtgtaggcatcttagtctacacctgcatatgggttcaagtcgataagactcaataggtagcccgacggggttacgtacgctttgtgctgatcgggaataacataccactccacatcccactccgcaaattatccataggtgaaataagtactagagcggcatacttcttacatgtaacgcttcatatcgccaaaagtctggcctacattgccaagaatatacaatcggatccacattaacttatcgcgcatatcgcccccggcctcaacgcgcattatacgagaagcattcgtggcagtgttagaaagcagataggatctcccagaattaacagaatgaattgatttgcaatcgctcttctacctttacgaaagtatcctagataaaaaacacgaaatatatgcggtgtatacgggatcctaccagtgaacaagtaaagggcagtatatattaagaatggcgcccatagagcgtttttggttcgtatttccgcactattgacaatccgaaagggacacctggcgccgacaggggaggccgaatagagcaaattcaaggaagtggcgaaggaaggactttttgcgacattacatcaactctacaaggtttattccaaggttgctaccgcgtcagatgcgctcgaaaagtatgatctacttttcgggggccaatcctagtatgtaagctacaaactataaatgtaatgcaaaacgctccttccagaactgagacatcaccccacctctacgcaacctccaaaatttggaatggatgtcagcttcgttaaagtacgccgatcggcaggagatggttgatgcgcggaacatcccttgcgggccgcataaccgtaatcgtgcccaagccggagacgggccgggcccgggcatcccccacggggaaaaacgtaccgccaataccgccttactgaacgcgaattatagaacctttctagaacggtacacaagctgtacgcaagccgtttgtttcgtgaaaaatagcattcttattttcttataaatttctaaacctattgcttattttcttatgccattaaacagagataattataatgcattcagtgattctgctggcaaaatatcatgtaatctatgcggtgtggggacacggagcaaatacatatgtccgctgcctgcaggtatgtgcaaacgagttcagaaaatggcatagaactagataatgagacccccactttcagttcagtgagataagagaagatcatcaaagcgggaaaacaaggctcgggagatggatcaatggcgcgggaggggtctaggcgccacgaggtctcatgcatcaaaatgcccaaagattccgggatttagaccattctatagtccgctctgtactagcattacatgatggttattttcgtctcaccttctgtattgagattccaactccggagggtagtatgtatgtatgagcatgacttcccaaatcatgtagtaaggctagatttgaaggccagcacaccactatatagctctagcaagggtttgtggtcagcagagttgtctacttagaacatgggagataaagtaagtttctaggttattgctaaatagtttgaacaacacagccgaagcatctcacgacctaaatttcggacaatctatcagtttgtaatgtaacaaaattctgatttttaatatcttcaacctcagaggtttgcagcccatgaaaattgtgtgcttcgttgtattaattcagtaatttactttcggctgcctgcagaggctctagctggcccccctccgtaaataagagatggatagttttgtagcggactagccctctcgttttttgccttatatcaatcagacttatatcttctcccgaaccaagtttcttatagatctgtaaatatacgatatcctgtacgtgaagggcgtaccaggaacttattacattcttacctctatcgtttcttcatcgagtttcatatcatgtcattgaatacagagcattcaaaaggagaccttcgtcttctcttcggaccacaatgctctgaaattgaagactccatcgcccacatccgggatgccgtatacaaagattcagccggtctggggttcttatctgatattcttgacgagcttccctccttatggcccgtcataacttctgcctggccagccctacggaaggtgcagggggagaagcaactagctgcactggggcggcgttttgagaatggatctccagatagtgaagcagaaccctcaagtctcatcatgactccagtcacggtgatgaaacatctagttgacttttggaatctccaaaacgttgcgacacatccggcgtttccatcctcgccattatcacggaccacagccccaaggataatcgactcacaggggttctgtgtgggtattctggcggcaattgctgtggcctgctcccaggatacacgggaattccagtctttggcttcgaacgccatacggctcgctgtctgtattggggcgttggtggacttcgatgagatcgtgtcgggtaaggctaagtcaattgcagtgcggtgggagaccccagcggaccatgactatcttgaacagaccttgacaaaaagtcccaatgttagtttctcctcatggaaagaaaaggaaacaaaagcaaagagctgatagacattcaaggtttatatctcctgctatacagacgttaacagcgtcactatcactatccccggtgacactgcacaacgggtcaaattcaaacaggagcttagcggccgtggtcttcacacaaagccgatccccctccaaggccgcttccaccaccagcaaacacaccgcgaaggcatccagcacataatgaatctatgtgtgaaggatcctcgctttcaactccctcacagcaacgcgttgatattaccccttcgatcaagtcacaatgggcaggtgctcataaatgcagccatgttgcacactgttgccttggaatcaatcctctctgtcaaggcagactggtggggaacagtctccgcattactaaacagcgccgatatggaagttgacgagtcccgtcttctatccatcggccaggaagagttcgtcccacgatcagctagaggccgtctggtagccaggagcaaccttgatgtctacggggcaggagtgtttgctaacggtaacacgtcggctcgctccgcagtgtcgctgcagaacggcacgaacaccctcaatggtagtccacaggcagctgagatgccacctattgccattactggcatggcttgtagatattctaacgcagacaccacgagcgagctatgggatttgctggagctgggggtatgtacagtggagaaggcccctgggaatcggttccggatgccagacttgcagcgggagcccaagggcccattttggggtcacttcctcgaccggccagatgcattcgaccatcgtttttttaacatctcagcgcgagaggccgagtccatggatccacaacaacgcgtgttgctgcaagtagcatatgaagccatggagtctgccggatactgcggatggcagcacactgagctatcggacgaaattggctgctatgtgggagtgggatctgaggactatactgagaatgtggcatcgcggaatgcgaatgccttctcagccacaggaaccctgcagtcatttatagctggccgtatcagccatcatttcggctggtcgggcccatcgattacgctagatacagcgtgttcatccgcagcagtggctatccatatggcatgcaaggtacgatatgagactcccattgacctatctgaaagtgcaatggctgactgatgtataaatgataggccctgcaaacaaaggagtgctcgattgccgtggctggcggtgtgaatattctgacaaaccccagggtgtaccagaacctggctgctgcttctttcctgtcatctacgggagcatgtaagtcgtttgatgcctctgcggatggatactgccgcggagagggcgctggactcgttgtccttcggccattgcaggatgcgattgacaacggcgaccctatcctcggcgtgatcgctggctcagtcgtcaaccagagttcgaacaggtcacccatcaccgtccccgatgcagagtctcaacgatcgctgtatagcaaagctttgtcactcgctggggttgccccgggtgaggtcacctatgtggaggcccatggcactggtatgtatcctgctttctttttacccttggtctcctctattctgccctcttctatttcgcctgcagtttagtaacaatgtcaaaggcacacaagttggagatccgattgaactggaaagccttcgcaagacatttggaaacccgctccgaagtcagagtctccatgttgggtccatcaagggtaacatcggacacactgaaacctcctcgggggtcgccgggctgttgaagacgatcctcatgcttcagaagcaacgaataccgaaacaggcaaacttcaggcagttgaatcccaaggtcatgcctccactcgagaacgaccgattggtgattcccgtagagtcaaccaaatgggcatcagcgagacgggttgctatggtcagcaattacggggcatcggggagcaacgccgcgcttatagtgagagaccacactcctagcctatcgggacaggggaaggcaatggcggaatacattcgagatatgcctatcttgatttctgcacggtctgaagaatctattcgggcctattgcggtgcccttcgcaccacccttttgaggcatccgtattccaataccgtcgtccgggaattggcgtacaacgtcgcaatgaagcagaatcgaacactgccgtttactcttaccttttcaacctcttctgatccgacatcactgagcacccgcttggaggctatcgccgcaggcaagtctgccgatattatccagaagcgggaatccaacgagcccccaatagttttgtgcttcggcggtcagaatggagttacttcgagcatttcacaagaactttacgacagctgtgtccttttacagacgcacctcatggcgtgcgagcaagcaggccagaagctcggccttcccagtcttttcccaactatcttcacatcagaccccatcgtgaataccgtttacctgcacttcatgctcttctctatacagtacgcatctgccagagcctggatcgactcaggactgcgcgtagaccgcatagtgggccatagctttggtcagctcactgcgctatccgtggctggcagtttgagtgttcaagaaggcatccgcctggttactgagcgtgcacgcctgatccagtccaactggggcccggagtcaggggtgatgctcgctgtggagggtacgcaggccgaggtccagcgtgtgctagagcagacaggccaccgtgctgaaattgcctgctataatggaccacagcagcaagtgcttgccggcacgggggaatgcatccgagcggttgaagacgctctcgctacaaacccattgacaagcaacgtcagggtcagacgtttggagaactcgcatgccttccactctagacttgttgatagcattgtgcccggcctcacagagctcgcagagtcctttgtctaccaagcaccagctatccccatcgaagcctgttcggcgactggcgactggtcgattgtcaccccggcaaagatcgtcgagcacagtcgcatgcccgtgcacttccaacgcgctgtcgaaagaatagctcaaaaactacaagttcccgctgtctggctcgaagccggctcagcctcgcctatcatccccatggtgcgtcgagtgctggagaaatcgtccgcaactcacacataccatagggttaacctcgatgggtcggacggaagcgggaatttggcaactgtcaccagcgccctctggggtcagggcgtccatgtccagttctggcccttccatcactcgcagcgtgggaccttcggctggatgaaccttccgccgtatcagttcgcgaagaacagacactgggttgactttgaccctactgctttctcgttttccggatcctccgccgaaccgcaatgtggcagtcaggagcgggctggcctgttgcgcaagttgagcgacggcccagaggagtatctatttgccgttaacacccaagatgtattgtataggtcatgcacgaaggggcacgcggtattggaccaaacattgtgtcccgcatccatgtatatggagatggtcctgcgggcagcaacttccgtattcaccttgggtgaatcctcaacgctgactatgtctcatatcgaggacctggtgatatcatcccccttagtattagatccgcaaggaagtgtgttcgtacgactgatcccagaggcagtggcttcttcccagacgtggtcattctcgatatttagcagtagcgggacgggtaatgagtcgtcgattcatgctacaggcagtgtatccttatgcaatgaaaggtccagggctctgtcacactttcagtctatgaatcggttgatggacccggcacgggcaagaggaattgaggatcatctggcatcaaacggactgaaaggatcgacggtttactctgccctcgaacaggtcaccaattatgcagactacttccgcggagtgaggcaggtgtttgcaaatggccgtgaggctgcggggctggtcagtatggcaccgtcagccactgagaccacgtgcaaccccatcctcctggacaactttctgcaagttgcgggaattcacgtcaactgcctctctggccgtgaagcagaggaagtattcgtgtgcaatgctatcggggaaacgtatgttagcgattcgttgttcaaaaaggaagacggagctattccgttatcatggaaggtatataccaactacgtccggccgtccaagaatgagatcgtgtgcgatatctacgtgatgaactctcaaggagacggtcttaccgccgcaattatgggcgttcggttcatgagtgtctccatccgctctctcactcgcgcactggctaagctgaacaacaatttccctgacgtcccacaactcccgcccacgatccagccagcaattgtgacagccgattatgatgaagccagtgacaatgtaaatgtggatagcgaccttgctgcagtccaagagatgctttgcgagctgtttggagttagtgtcgaagaggtatctccatcagtctcgctgatagatatcggagtggactcgctcataagcacagaagtgctctccgagatcaagaggagattccataaggatatttcctattccaccttggtggatattcccaacatccagggtttgacagagcatatcttcccgggacattctcacctagctccttcccagattgtgatcaaaccagtacggcagcagacagtgataccgcaaactgtaacttttctgcctgtgccagctaacgccggaccgtcgctagtctcagtagcacaccaatgcttctatgagactcacgccgcggtatcccacacacacaatgccgactgggccggcttcttcaatgccatctatccgcaacaaatgacactcatcacggcgtacatcctggaagcattccgcgccttgggctccccgctagagtccagtcaggcagatgaggtccttcctattatttccgtcctacctcgtcacgagcagttgaagaagcacctgtatacaattttggaatccgtcaacctcgtgcgccaaactccaactggtcaactcgtgcgcacagcgacacccatctcgccgctctcatcacacgccttgcatgcccagatccgggatgaacaccctccatatgcactggagcacgatcttctacagatcacaggctcgcggttggctgagtgtctgaccgggcaagcggacggggtatcgctaattttccaggattcccagactcggcgcctggtaggagatgtctatacggactccccggtgttcaagtcgggtaacctctacctcgcacagtatctcacggatgtcattcaaactctcggaaacggtcggcaggttaaaatcctcgagatcggggccggcacaggaggcactaccaagaatctcctcgagcagctctcggccctccccggaatggcgacacgcatggagtatacattcacggatatctcgccatcgcttgttgcagccgcgcggaagaagttttccaagtatgatttcgtacggtacgaaactattaacgtggagagtagccctccctcgctcttgcacggccaatacgacattgtgttgtcgaccaactgcgtccatgctacccgaaatctcgtcgagtcctgctcaaatatccgcaagctcctccggcctgatgggatcttgtgtctcgttgagctgacgcgtgacatattctggttggatcttgtgttcggactcctggagggctggtggcggtttgaggacggtcggaagcacgcgctggccactgaagatctttgggatcagacgcttcgccaatctggcttcgagtgggtgggctggacgaataatgaggctgtagagtcaaatgctctgcgcgttattgtcgcatcgccgacgaaggccccttctgctctggagatttgctccaagccggcaaacatggaaactgttgtttggggcgaaaggaatggtctgcagctgctggctgatatattttatcccgacgtggttgacaccacgcagaaacgacgagcatgtggtaagttcaaattcatcttttgtcccttgtaataactccatttcatactttcatttgctaaccctcttcagctctgatggttcatggaggtggccacgtcatgctatctcgtaaagacatccgtcctgcccagacacagacccttctcgatgccggattcctgcccatcagtgttgactaccgcctgtgccctgaggttagcctttcagaaggccctatggccgacgtgcgcgacgccctaggttgggtgcgccgcatcctcccaaatatccccttgctacgtccagatatccgaccggacggcaaccaggttgtggctatcgggtggtccactggtggtcatctcgcaatgacgctggcttttactgctcccactgtgggtatcgccgctccagaggccatattggctttctactgtccaaccgattatgaagatccattttggtcgaggccaaacttcccctttggacagactgtcgcgtcaaatgatatagagtacgatgtctgggaaggcctgcagagcgccccgatcaaaggctataatccagcgttcaaggaacggccactagggggctggatgtcaaccagcgacccgcgtagtcggattgcattgcacatgaattggacgggacaaaccctccctgtgctgttgggaggcatgcacaaagaggttcgcatacccgatgaactacctcgtccgacagacgaagagattcaggcagttagtccaaactatcagatccgcatcgggcggtaccgaacacctacgtttatggttcatggaacaagcgatgaccttgtcccgtgcgcgcagaccgagtcaacatataacgcgttgacccaaaacggcattgaggcagatatcagggtggtgcagggagctattgaggtcttgctatatctacaacatccagaacgggcgagaaaatggatatgttcgggttcactaacgctggagatttgacaagttggaacacgacggtgtgccaataagcggccctggccgcaacaaggaggaagaaaacgaagttactctgtctttcagtttacaatctaagagtttagtaggctgtacagatctgcttttcttccaagtatcccatgcggtctgaacttcactaaatcataagacttgctttaaactaatgaaaaggacactttcccgtcctagaaatcttcagttccttcatcatctcctcaattgccttctgcccctttccttcaaaatacttcggcccgatatcgtgaatatgataccccttcggatagtacttctcaccctggtcgcccgggacaggatgaccgagcgcccaggaaacccacgccattggaccccatctattccaaaatgttggtttcacgtagtagggaagtgcgtcccaagatttgcggtaatagcggttgtttggatcgggttgcttggctgtatttgacaccgcgaagatcaaaggtcgtgggggtgttaggtagcggagaatgaatgtgcgggttattaggagggcagagaagacttttgtccagaatggcgttggtggttcgtatctagttgatgttagcgctcgatatttcgttttataagatcagatcttactattccacatacaacatagccttcctcagccggtcatccatcatgaacgaagtgaactgcaatcccaccggatggaataccttcggcaaattataaagcagcacagctgttgcctgatccgctgattcccgattctgagcatctggaaccatatacttgacctcatactcctgactccaagtatccacctcctcgagccaatgaattccatccctaaaccccgtcttacctgacgggagaatgtcagaactaatacctagcgcgtcacctagactcttccaaaacgttccaatagcacagcgttccaaatcacttagcggccgccactcgaatgccgcgatgaaatttacaggctggacggcaaagagcgcaagtgtgtagagcaaatctgtatcaaggatcttgcctgaagcttggtagccgctgtgtaggaaacgcgtgcgggctacagagagaaaagcccgttgcgaggtagggctattttctaccatttcgccgataagggcggctgtgtctgtatagcgcttgaaggaggtttctggtttagaaaattgccctgtctttatgagaaggtgggagattgttggaatgccgtaagtctagaggaggttagaataagaaaaatatagattggtgtatatatttgcgtacccgaaataaagcaaactgccctgctttcacaaacatgaatgggaattctagctgcgccgtttctttttgaatctggaatgcttcttcgtctgtcatcttagccatagactcgcgtgtcgggaagtagaactttttttgtagctgtttaagtcgtctatagcgcagcgaattgataagaagggggtacgcaatcaacaagcccactgcaaatgaaaaccattgcggcatggtattgaaaatagctctggtggttgcagagaacgagggagttgtaaagaaagatgtgcctttatccataatgtggatattgtagttttgaagggtatctcaatcccatatagaaagctctgatatttaaatgattactggccccaaggcccatagaaaggggctatttatgtgacgccatttacatgtaactagctggtcataatacaagtactgtagaacatcgaaattcaggcgggcttgaagcaaagcccgaattattcttgatcattaggtcattgtatactatccgtctctccttgcacccaattatacgcaagataaactgaaaaaaagacacgaggcaactattctatttcaaccgtagacccaggtatcacatgtaccgtggacgtctaaaacaaagatgatattacatttatcttattcgagattttccgtaactgttttacatctttgtattattgcccttccatatgtatgcacatctatggatctagtaagcattctgcaaaggatggagtcccgcggggttgtatcgtggggctaatcttatacccattgagtctcttgcatgggcctggctggccccctattattatttattcagatatactccgtactatacagtgcttctccaaaagtacatacatgtacggtaaatactgcccgcatattacctagtactttggtgtagatgcattggtgtagatgcattatggtataggaagcagctcggtcacgataggctccacggtagctctcgctgcggtaagacggagcattcctcgtcactcatgcacccgctccaccgtctatgttattctcatgcatggtcattagaaattcatttttctgatagtcaccataacgtggatacggcaacgtgggggcagaaaactgcaggatgatgcggcaatgtggaaaaaccgggtctcttgtagtacaggatgtctcccctagaagtgctttgtgctgcgataccgggtataacttttgatagttctcaaggacagcccgattttctagctcatctgcaaagtttttgagtttccgtctttgaaggatatttgccaatctctaacactttattgcatttcattcacaaacatggttggttcaatggagaaccctggttcatgggaccttgcctgtcttctgatcagcacctcgcggttcaaccgatatatgccctactacacgatgatggccgctggtaaggagagcaccattccaagctctctcatgaataaagtattaacttgaaatctccgtgacaaaacagtatggtctaccttgattgctggcgctttaaagttgcaagaggatcccgccagtctctctgtcgagtacatcctcttcaaagccggcctgtgctttgttcactgcttgttactatgcggtgctgggaacacatggaacgacctgatagaccgtgatattgacgccagggtggaaaggacaaaaatgcggccgttggcatctggaaaagtctcaaccgtcgaggccctggtatggatggtcggtcagtattttctgtcggtgaaaatgctggacttaatattggataacagaagcatgtaagtctgacattcagtgtgataaaactccggccgcatggaagagcacaacttgattaaccccgtccatccctcttagatggggcttaatgctgcctttgacagccagtatcatgctgtatccctacttgaaacgacccgtattcagcagagtcttcatctacccccagtatatccttggcttggccgtcgcctatccatcgataacaggctgggcctcaatcaacgggcaagagcagtccatgtctgagatcttcacacattgcaccccgatctgccttcttatcttcttctggtgcctctatttcaacaccgcctacagtcaccaggacagcgtcgacgaccggaagatgaatatcaattctgcctatgtggtcgcggggcaacgcatccggttattcctcgccttcctgggtgctctaccactcgcggtgattccgtatgttgtgttgaaaatcaactctccctggctgtggttctcttggatggcggtttggaccgtttctattgtgatgcagattgttcggttcgattcgaagaagcttgaaagtggcgggcgtattcattgggacaactttctgttgggactgtggactaccgttgcttgtatagtcgaggtcggtctgcagaaagtagagttctggaacctaatctagtataaaatagtataagatattctaaattcattctttctaatttatagttaactagtgcagtggggaaagtcgggatgcctagtttagtggccttgtccttcaggcagagaaaacgaaagcctggttgtncaagtagagtttcggggagcaagtagtctagacggatcatcaccccaagaatgaaaaacgagttgcgagatgtttgtgtactaggagattatatgctatggtgtggtctatgtgatccctatgcttgctagctgaccccccgggatggttggtgttgttgtgtcgtcctcgtcttgcctgcatggccaggctgcccatcgtgcatttccctcttcactatctgctttccactttgcctatcgtgcatttccctcttcactagttagttagttaattccccataataattaatatgatcacctgatctatcaaacatgaagctattcagagatcacccgatctagcttacttgctcgtttgcttacttgcttactgtttgcattcaatgcattgtttacattgtttgctagatagctaagcaagatatgcggtatttgcactgtttgcatgcaaatagacagctatatatacaggcttcctcccactttgcaacttgcttcttctttctctccaccattatgcctgctaccaccgaggattctaccatgctttccattgccactgccaccaccgaggatttcaccatgcctgcccctgatcttgcaactaccaccgaggattccaccatgcctgcgataccatagtaaatggtccgtgtatttgaaaatggagtgccaagagtgaccttgcctaattaggttagacccatgccaacagtaagaatcttacttcatgagaggaaaggtctttaattgactgagtgagacaaaggttgatcgactgagaagaccaagcaggtttatttggtttcagtacttcttataccattattgtttaaatggctggatcaaggattatggatcatggacaaactattttagtactgagaggaagaaccacagcacaactatctagggagagaaaaccaatctagatatccgggtactataaaaatttgagttgaacatggtaagtgggatcatgatgaaaccttgagccttttggaagggggaggttgggaggtcgactgatcaggacaatgctgtccttggagaagtttcactatactgtgttgccctcctcgacgagccgcttggagagtatttccgtatactccaccctgggcgttgacatcggctcctcgctctagcagtatctgtgcgattgtatcgtgtccactagagcaagcagcctggagggcatttccgtaccgtccacactaggtattaacatcggctcctcgctctagcagcatctgcgtgattgtattgtatctactagagcaagcagccaggagagcatttccgtatactccaccctgagcgttaacatcggctcctcgctctagcagcatctgtgcgattgtatcgtgtccactagagcaagcagcctggagagcatttccgtatataccaccctgagcgttaatatcggctcctcgctctagcagcatctgtgcgattgtatcgtatccactagagcaagcagcctggagagcatttccgtacactccaccctgagcgttaacatcggctcctcgctctagcagtatctgtgcgattgtatcgtgtccttcagtacaagcagcctggagagcatttccgtaccttctaccctgagcgttaacatcggctcctcgctctagcagtatctgtgcgatcttatcgtgtcctttagcacaagcagcctggagagcatttccgtaccctccaccctgagcgttaacatcggctcctcgctctagcagaagttccacagtcctatcatgtccattcaatgaagcccatatgaccgggtatattcctgtatcatcaggtgtattgacatcacttttatccccaccaagtattaaatgtacctcctgttcatggccattgaatgctgccagatgtagtgcactcattacagaagtttctctgtatggtctgactgtcttccaaaaaatgggaaaccacattgagaacggtttgtcggtcatgtcgtataatcgatgcactcggtaggtttctttttgggttgaagtcaaacccatctttcgtacgtgatcaggccaatgtgctgctgaatattctaagaaacttcgagtataggggcgcgagtcatcttcatcatattctaaatcctccatcaataagtatctcaaacaaatctcagccatctgatcttccgcatcagtcaggctgttccagtatgaaggattgagattgctggaattgttcttcgctataagaaattctctggctgtttgatggatgagataaattttcgagttgttcgtaaagacaaataggccgcaccatcgccgaagcttgctgtccaaattaattggatctagcccagcctgtttggttgttggtgatcctgagctagtagcaattcccaatgccatagccatctctcttatggtcagaggacgccgtgccgccacgataatctctagaatcttcttgactctatccattagatcggctgggactcgacagagtatcttctcatatgctgcattcacagaaggcggaatcagtgtgatcaaatcctctgtaggccgaaggctgtttttgaaggtagtgcggatatcatcaatggctagatgtagccaaagatatgtacggtgttccatttgaagcagctgctgttcgattcgatgatgaagctccgttgatagtggcactgtctcaactagttctctcactcgaatccttaccaccagatcaatctcatcatgaatttgatcgttctgctcctcccccttgatatgtatatgtgggaaagaatcggtgattactcgaaagtgatcctgtatatgatcgtagggacgactggtgaccaggaatttcaaacaggttccctccgttgatgaagatggctggcgataaaacgcttcaagcttttcaattaatcggcgctggtctgtttcacaacattcatcaagtgcatcaaatatacaaatcgtcttgcacgatatatcagctgatgttgccgctattaagatccgccaaagctcatcaacttcttgccggagcagcctcccattcttttcccaggccggaatggcatattgtaatagatgaggctgctggctgaatagctgatgaagtaccgaacatagtgctgtagcaagattgttctgttcatcattgtctttgaagaaaaagtaacatattctcacagctggatgagaggtctctgagtaatcatcgattattgatctgaccaggacagacttgccacagcctgggtcagccgacacccagagaaggtcgttgcaattgctctcccaccaacggatatattcagagctctggaaaggccatcgacaggtgcccttagctcgatttgggtttatgttcttttgctccgcgtagttaacgatcttgaacacttggtaacaacggcgctgctgatccgttaagactcttgctttctgttcactaaagtgccgctcgttttgactatatgcttgatctaatcgatgttggatgcctttcagctcctctgagtagtgcttaggtcaatatttgctgacgtaataattataagactgcacaagactaaccagacacaacagcacttatcctctcctcggcttcaattctgttgagagggatcctcttcagaaggtctttggcatatgcagctgccaccatagctgcatacccttgccactctttgttcttatgtgagtcggagtaatcgcagataccccggatgacgagacatgggaaagtattcatcagccccgcggcttccatttcaaaacagagaacctctttttccgcagctagtctatctcgaatcaaagcatccttcatcaactggttggcagaagcaatcaggccatagtgaatggcagggttatcttcgtcgtcggcccgctcactccgtagtaccaacgttgaaggatcaaccgcacatttagcacagtctgcttggtgatggataacttcgggaagaaacagcctatccgtcattggctctggccttttgtacttccgacgtagcctcatgttctttccaaaaatgccgttgatggcctcctcgagctgatgtccttttctctcgtattgagttcgaatacctgccattgcagcgcgcaatatagctggtggctggttcagaaaccgtgcttgctgaaaactttggtcctggatcgacttgccaaaatcgtattgaaacacaccactctcgctaccccgagacgcactgaccacaacatcgcccaatcgaatatcatggttttcgcttggtacacccccccccaatcccgaccataaggccgatcctgatgttgtgaaaactgctgagcatatttgtcgctacactggccgcggaagctgttccatattcaccatcgggtaagacggcaatgacgacgttgtgttcgcccatcttgcctaatgtatagtcgttggcatcgtttggcgacacgaagctcggtctgtcatgctcttcatcgagaaactcttgtgcggcaatgtattccacgggtaaggcgcaaatccagcccacagtgtaccctgcaggatctgacatggcttcaacgcgagagaaaaagcccgaaaatcaggtacccgcgtgacctttcgaaagtcctgacgtgcggtgtgcaatagaggcctaagttatggggacaatatatgcggctgtgagtaaaggagaggggaggaggcttgagagaaggaagaaagccctagaaggtagagagaaaatgtttgcctaccggggagggggggggggggggcgtcagcctcatgatgtacacgatgtgcagcagcgagcggtaagagaaaagatgctattggcaggagccgtcttctccatcccctcgaagcaaagaaatgctaagatcagccttggaatgcactcatatggtccgtaatttcgctgtaaattacagggaaatacattcaggggggattatattgatgtccgttaaacaaaaattggcgctagtgccttgaaagtgggtcctgagaaaagaaaagcagtcgttgaagagggcgactaaagccacaacaacgaattggactcaagccatatctcatttggggctgtgtgcagatgccaagggactacgtgttccagagtcaacctataacccaatcatgtcacggtcctcgtcacctgagggggtcagtgcgcccgtcgcgcgcgacctggggtgaatctcaccctgatctcacccagcttctcaccctgtttatagtgcactcacccttctcgtccgggcgacacccacccgactacatattgactgcgtataagccacacgccggtaagttagtagttgggtgggtgaccaccagcgaatctctactgttgtatgtctgcattcacctttttctttatgattcgttcggaaacttccttttgccgccctagtcccaacttggtggcctgagctgttcctgatcgaagctgatcgcagaaaatagattcaccgtggctattataactgtctggtttggtcatagttatctcttccctaaggatgtagtgaagattctgactaaagcagaggtgcggaaacggatggctcgctgtaatggaaataaccacaattgaagagctctcccatggccgaacgcatggagtactggatggacccccactaagaaggaccccagcgctccatatccagggaaacgatctatactcttaggcctattgggttgttggttcttatattccctacgggggtctgatagacattaacatactaatgtttaatcaactactcgctagcaaactttctacttattaggtgcttgtctaatcccgtatatcgagatgaagggggtgagaaagtagcagggttcgcatggattcgggcatcagttaggcacacccaagtgactcaggatgggggctgcagattatagcgtgaattccgagccgtatgcaggtctgacgtagcaaaaccccataaggccgaatacactaagcccatgacccggtgatagaagtaggattttaagaaagattctccccttcttttcgcttgatagcaccaatctccctctgtgcatggggctttagcttgcctttgactcgttgttatctactttgaaacaaactagagccccgtgatcgaccggaaccgactacggctgattaatatcgacattgaccttcggtagcccaaaggcctggtccagtcctcttacaatgactgcgcagatggataccgaacccagaactcacaaggaatacgctgtggggtgggtatgtgctctgccaaaagagcagaccgcggcgacagccatgctggatcgaagacacgtcgggctcccgaaaccgccaaatgaccccaacacttacacacttggatctgttggcaaccacaacgttgtgatagcctgccttcctaaaggtcagtttggaaacaattcggcagcgaacgttgccgcctggatgatctcgacttttccatctatcaaatttggcctgatggtgggtatcggcggcggcatcccacctaaggtgagactaggcgatgtggtggtcagcacacccgtgggccaatttcctggtgtggtccaatgggactttggcaaggcgaaagaaggcggcagcttcgaacggactgggtcgctgaacaatccgcctacgtctctgctcacggccctgacggcgttggagacggagcacgacttggttggctctaagataccggagtacttgaaggaattgagggagaggtggccgagacttgtacccaagtacctgccgtctgatttgcaggatatattatttaaagcagattatgggcatgcaagcaggcgccccttggatctcgatgatacctcgaatgttgacgatgtagatgaggacgaggaagagagctgccgattctgcgataaaacacaaattgtacggaagaaaccgagagatatgtctgtgtacttcggtctaatcgcatcaggaaaccaggtcatcaaggatgctgctctccgaaacaaactcaataaagatcttagtagccatctcctttgcatcgaaatggaagcagcggggctgatgaacaacttcccgtgtatcattatccgaggaatctgcgattatacagactcacacaagaacaaagattagcaggaatacgctgcggttgttaccgtagcatttgcaaaagaatttctggcattcttgcaaccaactgatgtcgagggagagcggccagtgaaagaaatacttgggcagggttagtcaactttaagatctttttactaatttggccgaaccccgctcttattagcagttcagaatgggcacgatgcagtggtgaagctactgcttaagaggaatgctgtcgtcgattttcaggatacgtatggccgaactccgctctcattcgtggccgagaatgggcacgatgcagtagtgaagctgctgcttgagagaaatgctgccgtcgattctcaagctcaatatagccgaactccgctctcctgggcgaccgaaaatgggcacgatgctgtggtgaagctactgctagagaggaaatcctagatcaaatcttcgaatcgtgaatattcccagtctccgacttctctctaacgaccaactcaggtgtgagggtattaatgataatatctttaatacagcagcacaaaagcgagaggagatgcgccaaagttgagatgaggcaggcttttaatgcgaacatacattgaactatcaccatggagattagcctcaaaggatagggtgtttctcctaacgtagttactgtaggatatagttgttgatttccatccgcttaaatactttcttcaagatgcactgtgatttatgtaaagaaaccacgactttgtcagagagcggttgattggttatgtttaatcattggattatcagttaaaacctttttttccagaacccgatcacaatattatcgagaagccaccgaccccaagaaaaaagatggggagaattctcacttccatcaccaggtcatgggctatggatttatgccacgtcagacctgtatgtaggggtcgaaattcacttaccataatatgcgtcccccacctcatcgcgcaaccgtcgcacggatctcagctggattatgttggaacatcattgggtggaccagtcaaaatgggtgacctgtgcaccctaacggtggcatccaaaagtcgacaatgtcacgtccgtctgatgttcagtagcgtgcccgttgccctgaaccccgtcagctaaacaaaagcagaatatcattcaattataccgttcccctgaaacactcggcatattggcatgcgcacatatatgttaattacctctatataccatatatcgtatttcctataggtgttctggggtgggcggcttgcttaccgaatacgataactgttagttagtgagtcctgttgaccgtggagcgtaatggaaatagacgtctgaattgtcatattcatatctcaacgaatgtgacgtcatgaaagatgattcaagccactatcttagtactgtgacttggttactcagtcaggcaacaatttgtggatcgatgtgattccgcctatgcaagatttgctttctagcgctcaacacagcctcgtcaaagcggaacagcctccctggattttttgacttaaacttgggtcattcttatacttcttatacactgagcttaatcaccctttagtacaatactactatgccgaactctcgtataacaagctctgatttatccgtctggcagtggaacgaaggtatatttctcaaatactctgttatgttacagtactaacagtatagaacatggctggcgcaaaagtgaagcccgtctggaagatctgcgaacagacaacccgacacgtccaccctcattgatttcagaagataccaaagtatatgttatgtgagtccagcttatttggttggccccacaagaaaataaactaaaagtagtatgaacagaacgacaagcgcaaagaatatccgcagttctcgccagtttcatcaagtattcatggatgcattttgcattcccaaattctggtgggctgagcatcttggtaatgccaacggctactttggatgcgaagatacagatcatgtagggggagctggattcagtaagtctgctttatgtttgtccttgtgatataataaagggcgctcacactctaccgatactactagacacctgggcgtttttcgaagtcaagcatattgctagggacacgaagtatcactggtctaaaataaagctctttacacgatggctagagtcgactcatcagaccggcattctgctattcgacccaaccgatcacctctcgactccactgtttgatccgaatctgacagaacttgatgacccattttggatgtaccccgatatattagaacaggttgttcggtttcaagaaggttcagtatggggcatccgagatcatgttcgagatgccgagaaagaacaaaggcctgcagacaaaaagcccaagcccaattacaggcgactccatgacatcgctcggcatgcaattcatgttaccgagtcactagatgtggccgtccagaacattgagcatctcgttcaacagcatgaaatttatataaaaagcatgcaagtggaacctcaacctaaatctcatcaacggatctcccggcggttggcattcttccagagctatatcggcagcatacggcaccggtctgtatcaaatcagctacgactccaaaacgaaattcagctggcattcaatattgtctcccagcatgacacaagtatcactgttgatattagccgtgctacgcggtcggacagcgctactatgaagacactcgcatttattactacgacattcttaccaccaacattcctctgtgcagtgttcagtatgtcattcttccactacgacgcagagtcgggctggggagtttcggacaagctgtggatatactgggtgtgcattatcccaacaattgctgcatcggcccttctctggaatttttggcccaaactatttccagatcatttttatagcgcatttcgagaagaggaaagcacagagctgcctacctttatttgaataaggactacttgcattgatagacaatatgttgtcgatttattatttgttcttttggagcaatagtaagtctccggcgaatcataaattgaagacaatcagaataactaaagctaagaatggtcgtccgtgacctatgacccttcctttattttcggaccctctgatgaaagtggcatcctaaatgagccggtcggtatacccctcaatagacgagctctcgaacaatggataaatggatctagtcgagactctattggaaatagatgagtctaacggaaaatcgtggtaatgcgagtgtaatggtcaatttatacagtatggcgaaaagttctctatttaactaagataatgcagtctttttgtatttggccaagtaatttagatgcagaggaatgagaagaccattgttttcggagcaagtgactagacttatgtacctcttttgaaatggcatcacttaaggcagaaatgctaagaagaacgggcgatgcgtagaattcctaggattaagatgaaatagctatggacccttagaagtttagtaataccgatcactcttgatggcttgtcttcggtttatgacctactgagcaatggcgcgaaatacatgacgttttacgatcagaaaagcggcgagaagtgagcacttaaacggaaagggaaaggtctcgagtgccgggtattattcggtacatatgtacaggacgttcgagttaatgatagaccatccagcaagtgcgttcatgcactgagcattcacaaaagaaagaaactagcaccacagtattattgcaaggggtcatggagatgcatatacttcgaatgaaagactaaacagcggcaggggtcataggggtcgggaacatgacaccgtacaaagatgagatccatgtctggaagccatggagatgagtattctcatcactgccctcgttctgagatccagcaggcgatacctggctctgcgcggttacatatgtgtcccgtgagctggttgctccaagcgaatcatccggctcatcatggctgcccgggcagcagaagaggaaagactgcgctttcacccacgacagaacatccggacatacgggcatgtttgtgtgacggccttcatttgcactgccgccgcagacagtcatcgtgaaaaccgactgcaaccgcgatggcctaggagggatgtggtcgccagttgccctcgttccttgggcagtagactccaccgaatttgtaggaccgtttgagctagccagattgcgcgacaagccgagaaatgtattagctctgggccgcggtgggcgatttaccacagcaggggccgggttcgatggagaggggaaatgtcgcctagaggacctggcgggaggctgggaacgcctgcttgggtttctcccaaggctatcctttgtgtgtgcaccttcaccataacgatcgtagcttgtatatgtggcttcgcggtgggcaacggaaagattgcgttggtggaaagggtggtcctgcagcggtcgacccatgttcatcccatgtccactttgtcgatgagggaaccggccctgtactagcgtaccatcttcggctcttcctatcccattaacggaaatcccactagcatgagacgcagaagatggcaagccaaagaatctccttagggtatcgccatacgaagtcccacgctgaccactagcaagacctccacattgcatgtttgcggatgaccgtgcattgttatctgggatcatgaaccgcgcagagatgctcatagcttctgatgtgccgaaggagggaaggccagggggtgtaggcgatctttctggcggtggatatcgaggttggataatcgttactgcaggtcccaagttcccaggccatttaggcctacggatactagcatcaccgagggaaacagtcttgcgatgtaaagacggacggcggtctggtaccgatgtatttccacccaaaggaggtctcgaccggtgtgtggcttgccagtcctggtcagataaaagcttggtgtgattcccaagcttccttgccattctctgtcgtcttccttgactggctggcacagtcatcggagtatgatcatcctgtgaatctgaaggaacgaatctggccatgtttaccgctaggccttgctcgtgaacggggttctcttgcaggagagacgcgtagaaacgagggctggaattatttggcgtggtgactctgatcgcattgtatatagatcgttcatcgcttagggtggactcaaatgagtctgggttatcgtatggcgaagtggagtcggaatcgcgaaggtgctttcctcgtcggaggctctgtgatgctgaaataaactgtgaatgagggttactagactgatcgattattcctcgggccatcatcttgaaggcaaaggagcgaagcctggtcaagataaaaatatactgggagagagtaatagacgggaatacccaaagaagagtatgtgatttccctgaaaaccctcatcgtgcctgccgagatcaagccaaaaaatattatacaaaacaaaacaatctatatgtacactctcaaatgaatatgcgctctaaacccgaaaacgttgaatgtcatgatcataatggagtgccacctgggctgggaattggcttgccagtcacctgggcgtgctcctttcttagggctcgcagcaacccttcaagtctgcgacgctcttcttgttcggcctaggaggtgttagttagaaaagagagaaaggcacaaagacaactcaccctcagtatcttcatgttctcgttgcgtgtgtcacgcatcatcttcttgaactcatttttgagcaccatggtagatgtcgtctcagaagtgccatcgcggccaacagatgtaggactactcaagttcatccagctgatacgttcttccgccagttgtgtctcgagttgctcgcaacgatcccggagagtgtcaatgaaaatttcgaagcgttcgcgttccttctcaaactcgatgctggcttttgtcatggcttcgtagtcatcgataatctcgcgaagttctctttcaaggttatccgcccgctgctgaagatcggcacctccgcggtggctcttcagagaggccagttcttcggtgagctcgatatttcgggtaaccagagcatcgttctccttttggacattagggttggaagccacctctgccgcgcgctcggctcggctaccataggcaccatccagctctgccttggccattgtcagttcagttgtgacccgcacaatctcgccttcaagttcagtcaactcattctgcaggcgagtgacgttctggtcggactgcgcgcgctgatcatctgcttccttaatgcgggcatcagattgaatccggatctgttggattgcggtttcgagttgagccacctcttgctctgcacggtcacgggcacccctgacctcctctgatctggaatcgctatcgttctgcagcgtttcaatgacgctctgtaggcgttggacctcgttctccgcgcggtcccgggcttccttgacgtcctcgcctttagcaccgtgctcgtcttgcagagacccaatgatgatatgtagacgcttggattcatcttccgcatgggcgtgggcctctctggcttcttcggtcttagcgtcgagatcattttgcaatgatgagatgaccgcctctagacgcttgacttcgtcttccgcgtggttgcaagcctctctagcttctcttgcttcttcactcttagtggcattatcattctgcaacgacgcaatgatgacctctagacgcttgacttcgtcttccgcatggtcacgggcctctctggcctcttcagtcttagtgtcgttatcattttgcaatgatgaaaggacgacctctagacgcttgacttcgtcttccgcacggtcgcgggcctctctggcctcttggctcttagcgtcggtatcaatctccaacgacgcaatgacggcctggagacgcttgacctcaccttcagcgcggtcgcgggaatcactgagttcctcggctttagtatcgttgtctctctgcacttcgtcgatgtattgttctaggcgcttaatctcggcctctgcttgatcttgggcatcccgagcatcgctaacttcgttagtcctggcatcagcttcgctgtgcaacgaggtaatgacgctttgcaagcgcgcgacttcgccctcggcctgaaccagagtcgccttggtttcttcctgagaagagccactgtggcgcatttcgttgagctgcgccatgacaagagccagctcatcgcggttggcgttgttttcacgttcggatacttcgagctctttgcgaacttgggtcaactgttccgtcagttctccgatctgggcatcgcgttcggcatccgacttggaattgagctcgcgttgctgctggatttgcgtggttagaatactcttctgctcaagtactccatccactcgactttccaggccatctacaccagcttgaaggtatgagagttgttcttccagcccctcgccgtgagacgcatcagggggtggaggcaaggtgggcgaacgagtcaaaccaaaccgatcaacaatggtttgcactcgattgttgatttcggtgagttggtgcttccaagcgtattcgacttcaggtacaatatcgcgagaagccacgggagcaggaacgtctcccctgtgcaagacgatattatccatgttattcttgatatagtccaagtgagcgtcgaccgttgctgtgggattgacaggccctccatcctctgacagctgcgggggagggtcaatggattcaccggggttgaactgtatcatcatgtcatgcatgcgcgcgctaagttcctccaatcgtcgttctgtagcctgcatggcctcggtattcattacgccggccgcgttcgtctcggtctttccgttcaagccaaagttatccaaattctcagttgtccggtagagactgcgatcgtcgaatttgtcataggtgctatccgaagtgctcggagcagggctcttacggcccttcttcagacccttgtgtgtcatctgcaagacacccgcagtgtgctccagcaagcgctggcagatcgtctgagacctcttctccaacctccagagttcctgcgccaactcctcacatcgtctctggctgaccgcgagttcagagtcgctcttttcgagggcctcagaagccccgctgcgaccaaatatgccccggctcatccggttcgagttcgaaccaccattggtattgtattcgccgctgctccgtggactgggcgggctgtagagcctaccgagagactgcgccgcgtcacgcagttttgtttcgaccgtcagtttccgcttcgtgccctggatgcgaatggaaagtagtgtcatttccttcttcagctcttccacctcttccaaggacaggacttcgtaattcgtgctatctcctatcgcggtctcggtcaacatgtacatcgccacggggtcgttggcattaaggagagccgagcttcgcgggtgatccggattgagctaccaaaaacaaaggaaccatggtcagctagagtccgggttggtgtgttgtgtcgctactcacagggttgtaccgcgaccggtcctcatgttgggggtctagagtatctcgatacccgtccactagtgtctttccaagcggcggcaccggacctggagcatcggaggcgtttatgctcatattcgatggataccgcgagtccccgtaggaggactggctggagcgcatacttgaattcatggtcgttcaatggccagggtccctccaattggaattcgtaagagaaattcaggaacaggcgtcgggcatcatgaggccctggagtttgcgatcggagagaaatgtagtaggggtcactatgggttaggggaagagtggagagggatctgtatttagcgaaggcacggagtagctaatattaaaagatggcggggagcaaaggagaaaatagacgatcggcatcaccttagggttcagccacggcaatttactgtgtaagatgttcgatttgtattctacacgtacggcgtagatatcataaatttacagattcaaggttcagattcatagatttagatgtatggagtcaatacccctgaatacgtatacgagatccaaggttggtcattccactttctttgtcttcagaggtgattcgtttagagaaatccactatattgtacagatacattctactagacctactgtgcacccactgtgctatatccgacgactatattagttggaaactaagataagccgacctcacttggttcgacgatcaaccccgctgtgtatctccagtagtacttgatagtacttgcgtaatgcagcgtcatagtagggctgctcaggtaccgccaagtacccggttgcgtgtacctcggatcccccagagtcacattgaaaaagccaagagactaaaaggatgggagaggccgctttgtttctctttctcatagaggcccacacagaatgaatttggtctgtcacacttcgctgtggacatgtcgaattttggctcttcagataccgagcagggctctcgacctacctacaaggtctataagcgacgcttctggggcttagcccaactggtattgctgaatattgtcgtcagttgggatgtatgcgcgccctcgtgatcgatccatatatcgatttcgcatgtcgctgacgctcgtaaacagtggttaacattctcgtccatctcgacaacggccgcggagtacttcgatgtctcggagagcgctattaactggatgagcactggctacctcttcgccttctgcgctgttagcccgtaagtagacatgaatcgcctgttttgaaacagcaaaagaaaacaaaaatatccgctccaagtatcccacattcactaactatactcccagcatcgtcatctggatcctgaacaaaagcagccccaaaccagctatagtcaccaccgccgcactcctgctagtcggcaactggctcagatatgccggcactagagccaacggcggcatcttcgggctcgcgatgctcggccagatcataatagggttcgcgcagcccttctgcctctgcgcaccaacccgatacagcgagctctggttctcagatcaaggccgcacgagcgcaacagcggttgccagtctagcgaacccactcggcgcagccctcggccagttaatcgactcagaatgggcgtcgaaaccctccgatattcccaatatggtcctgtacatcacgatcatcgtacgtgaaaccccatcccaaaaacttaaacctactcacccattgattcattctcgctctcgctcaccatgtaaaaacagtccaccgtcgcatcaatcccatcattcttcctccccgcctcaccaccaacaccagcaagcgcatccgccgcaaagccgcacacgcccctaggcgccgcagtgcgcaaactaatcaccacgcgggaattctggcagatcttcatcccattcgccgtatacgtgggcttcttcaacagcgtctcctcactgctgaaccaaatcctcagtccgcacgggttctccgagacagaagccggcatcgcgggagcgatcctgatcgtggtgggactcgtcacgtcggcaatcatgtcgccgataacagaccggtacaaacactacctgggcagtatccgggtgctagtgcctatagtggcagccacgtatatcgggcttattttcgcgccgggcagcgcggcgggaatcccgccttcatatgtggttatggcgctgctaggcgcggcgtcgttcgctatgctgccgattgcgctagaatacctggcggagattacttatccgctgtcgtccgagattgggagtaccatctgctggacgggcgggcagttgcttggtgcgtgctttattcttattcaggatgcgttgaaggctggggctggggctgcgccgccgtataatatgcggaatgcgttggtgtttgcggctgtggttgctgttgtggctgcgccgtttccgttgacaattgggcttttcgggagggaggttcatcgtcgaaggtgggaagttgatcgcggtgttgagatgcagactgtcgcggatgtgtctgggaccgttgatcatgttaagagggttaggtctgatgattctgccgtggatactgatactctgatcaagacatgagagaatttctgtatcagatttcttttgggatgagcgactcatccatctcagttcggaagagctgttgacgctttgctctttttatttattatgtgccataatgcacttgacgagtctttatttgatgtccctggtcagcccgagttatacctcgtccatattaccttaatacatcatgaatctatgaccacccacagggacttgagtcgatacatcagtcttagcgaattaagcatacttgtagataatctgaccacgacaataacgagccgagttatatgaatcctatagtcggatatggctaagcctagtctaccagagcacaatgcaatctagacagatgagattcgttttaaaacaagagaataacaaaagcacagtttgaacaggcggaagaccagctatctgtacacgcaaggctgagagaggagggcgaatgatctattattctgtttcttcctctgagccctcctccctgccttgaaaacacaatacatatgcgaacacatacacgcaaggaacgaccaaaaacatgatttcacatttctagatcgatcctgcgttctcaatccaaggcggcaagctaccaggctatcagtccgccttggcagccatcataaaaacgggattggtttttcttccggcgtttcggtccaagagtttccccggtatcaatgcggtggagagcgaaggttattcgagggccggatcgatgcaagggttggatggaacgccaaaatcaagactcaatggaagagtcgtttacttcagctccttccagagcttaggagcagcgcaggcagtgacgcagtgagtgaggtggaagactgggttttgttagttgcacaatccggactcgatggaaggtaattgcatggtttttctgaatccatcgttgatgtcaattgcacttacactcctcgacgcagtcctccttggggcccttgtagtcctcatcctcctcctggcgggtgacgcgctcaacgcactcgtcgtagtggtgcttgtagggagcgcagacggcggagtgggcgcactctgagagtgatagttagtctctgatcgagatggccggtggaattcctctttgcaatgccattggtggttttatcaaccacgcgcggatcctgacacataagaccaattggtacgaacaatagcctatgtccaacgatcgcatgacagagacgagaataaaatgcgaataagaatagtaaaagtcaggaaaagaacaaggtcactcaccatcctcgagcttgggcttgatgtcctcgggctcttcatcttcttcctcctcttcttcctcttcttcctcctcggcctcaccctcctcagcctcctcggaaggctcctcttcggtgtcggcctcctcggtggactcgctcgaggcggaagcggactcttccttctcggtgggctcttcctgggtggtctcggtttcggtgtcttgggcgggagcctcagcctgggcctcggtgaaaccgaaggaggagacgacgtcagagaaaaattcggagagacccattgcgacagagatcaattgaatgatgaccggaggtcttgtgtgggggtggaaaagcggaagggggttgtaattgaaggaggttgttggttttgcccaagagctgcttctttcggactggaaaatcggaaaggcccggccgctgagagacaccaattatgccgcacgtgattggccaatgggctccaacgccattcaggacgtgacaagtgcagtttgtgaggaagtcagtactagagttattcctgctggatataaggatctcggaggtacaggataattctactattgttcgttgagacccaacgttggcgagcatataaactcttcgtttctccatttctaagtgcggaagcaccgctttcgtgtcgctaattgctaattgacggggacataatgtacataagatagagaatagaaaggagccaattcaaatatgtgatagaaggacatattgaaatagattcccgaaaactcaggtggcccgtcgtagcctctcctccagctcgtgggctacactctgcgactgaacctcctcatagcatggaggcggttccatgggttcgttgctagtgtcagatgctcgtctgttttctgactcttctggtgtctcactgggtctagcatggctaggagtagggggagcttcatatgcaggcagctcttctagatgaactgctgagagatccacgttttgtcggccccgagtgctttcgcctgtgttctcaacagcctgctcgagtcgttccttaatccgttcgaagttggtatggaaatcaaaggctccgccctccttgaatgtcactttcaactgaacggcaggcagagacggtgaaatgccacccccagatactggttgtaccagagctgtccatacattgggtccaaagaatggtgcagatacatgtgagtcacggacattcaacaggggtgacgagaaggactgaaagtcatcgcttctggatgcgggaaggtagacaacctgacgagggttaaattggtcgggggcatggacacggatgaatactgactctttgattggtgaggtggatgcagccagcgctgctttggactgaaagtttctctgtgcctttatatccggacggtggagtcaaagagacactagtacgaggaggggaagagtagatcaaacgctcgttgggaagacggacgaagccctgatcatcaagcattacccaactaggcagtcagtatagaagctttaagttacatgggtctggtcctggccggccccggggagaaacagctatggaggtagatgcatacttgagagccatgatttggaatcattccagtcgcatgtgacactgtttttaatcagcccaacactcaggagaaatggtggtcgggttgaatgccgaccttcgaaggtgtaaggtgtggatattgcggggagggatcaaagcaagatctgtagatttccccgaagacaagatcaaaaagccaccctttcagagggtttcaaatgaagtgcagacttacaatatcaaattgagggaagtggaagtggaaaggcggggcaagcgcaggcggggagataaagctgaagggcaaacttcggcgttgcacgttgtacggggaaaccgatcacttttttcttccactctcaaatacacaattgtgaaaatgttttccagcttcgcagtagttgtggcaatgaaaatctcgaccccgcaattggcgagacgagtcaatgaatgtagctaagttgtctcccgcggaacctgatccgtctctaagtcagcataatgctagtcggctaagcaaaatatcaatgtctcaaaacaccctggagactctctgatgtatgtgggctcaagtttcaatattagtgaagctggcatagcttttggatatgcaatatttgacgagaattaacaagatgccggtcaagttagtaaaagccaggaagaccctgtacacggtatttataggaaagttcggctttccctaaaggttaaagacgaaagagaagaagagaagtaaaagaaaagagtcattgttgtatagtatactacttcctacggagtattccactgtctatatagaacacatcgtctccaccgtgttgagcttaatgcttcgcaatacgcttggctatagcatccaggtcgatctcatccaaaaacctggaatacagtagcctgacgctttgatccacccaacactctgcataaatgtcttggggtgtttgttggaaagtcggaatgatctcatactggggatcttatcttgtcgcaaatgatgcaagatcaggcctgtgctcacctagaaggggctaaccatgtacaacatagtcaagagtttttcttagtgtgactgatcatatcaactcaagtatcatgtaatatttggaatttacacagagagaacaagagaataatgagttcaaagttgaagttcaatcgtagcattgaacttgccttgttccagcatgtcacgttctagaagcgtccgagtcaaagcgcgcgctaaggctcaaacctttcagtttcgcatttcagcttttcccctcttcttgcgcttctcccttgatttcatgttctaataccctgtctatcggatatattggatagttcgtgctgatctgaggctcgaaatagccaagtaggtggatccccacctgggcaagctcttccggttagccgtactcatattaatctcttcgctagggacttcatgtcgagatcataaccctttcccgattctttcacgattctttgacgatccctcaacgaccctcgagtcttctttcctccgaaaaattgcccatcgggcttctacggcacaatgggagaaaagggccagtacatcccacccctcgttgggtggatgtatgacttggtcctatggtcattctccgtgctcatcgacctcttcttccgcgaagtccaccctagaggttcatggaagatcccccgccgcggccccatcattctggtggcagctccccatgcgaaccaggtatgccgctcgcttccggtcatacacacaagatactaatggatgttcgcccagttcgtggattctttggtattgatgcgcgtcattcgcagcgaagcgcaccgtcggatctcatggcttatcgcagaaaagtctttcaaacggaaatttatcgggtttctggcgagagcagttggaacactgcctgtggcacgtgctatggacaacttgaaacccgggaccggcaccatctatcttcccgacccggtcaaccagccaactctgctacgaggtgtgggaaccaactttgaagggaaaggcttccaaaaggacggaaccattgccctacccaccatcaacggaacatcatacagtactgcgatcgccgagatcaagggaccagaggaattgatactcaagaaggctttcaccagcaaggatgcgctgacccagcttactggacggcaagacattgaccgtgatgggaatttcactggcgatgcatccgcgcaggatccagatttcaagggtaccaagttcaaggttgctccgcatgtggatcagaccgcagtctaccaggcagtattcaagaggctaggtgcaggcggctgtgtcggtatcttcccggaaggtggaagccatgatcgcactacactgcttcccttgaaaggtaagctcttcgtattcaagaggtacagcagatttactgacatgatacagctggtgtcgccctgatggctctaggcaccctggctgaaaacccggactgtggtctgaagatcgtgccttgtggcatgaactatttccatgcccacaagttccgttccagggccgtcattgagtttggtaatccaattgagatcccctcggagttggtggaacagttcaagcaaggtgaacggcgggagtctgtcggcgctttactggaaatcatctacggaagtcttgtctcggtcactgtcattagtcccgattatgacactcttatggtaagtttctttatatcttaggggatttgcttccgctaacaattcaaaggtcatccaagctgcccgtcgtctgtacaacaccaaaggaaaaaatcttcctcttcctatggttgtggagctgaaccgccgtcttgtgaaaggttacgcccacttcaaagacgatccccggattgtcgctttacgcaagtctattgtaggatataacaaacagcttcatcttcttggaatccgggatcatcaagtggcctacgccaagttcaccattttgcaggtggtggccacgttgatttatcgcctaggcaaattagcgctcttgacaatcgggacgctccccggtttcctgctctttaccccggtcttcatcgcgactaagtacatttctgcaaagaagtccagggaagcactggctgcttctacagtgaaacttcaaggccgagatgtcatggccacatggaagcttcttattgcccttgcatttgctccggcgctctatgccttttacactgctgccctcacttattggacatactggaaccgagtcaatggacttgttccagattgggtgccactttggtcgatagtggtgatcggcatggtactcttccccacagtcacgtttgcggctcttcggatcggtgaagtgggcatggacatcatcaaatcacttcgcccacttgttctatctctgaacccatcgtcggctaacacgctggtgaaacttcgagcgagacgcgttgcactggctcagcaagtgacagacgcgatcaataccatgggacctgagctattccccgactttgatgccgctcggattgtcacagatccattccgagatgcgagcgacaccgataccaaggcggacaacggactgccggcgatcagaagaaccagcgtgccagaacatggcgagaaaatgccctcgtcagagcccctcccccgcaacgaatccttccacaacctggccaacattggcttcttctccacacgacctcctagtcgtaatcgtagccgcagccgatctgctagcgcccgacctgggtctcggcacgggctgaagcctctcagcactctcaccccgaaagacccgctcgaggatgtcagttcacggatccgtgatgccatgagggagcgcggagaacgtcgtcggcgtcgaagcgaagatggaagctgggatatggccagctcaggccctggaacaccatccagcggtgatgagtcccgaaaagatctttgagacgtgtactgccttggccatttaatcatttatcatgtcgaccatcaaccatggtgtggtgttcggcgcaaatctgtgtacgtatttactcttatataaccatacacgatatcccttgttttttttttttttatcatgaatgctataggtagtgcagatctgctaaaatcggaagcctttggtatcataattagcagatgtctagaaggaggcatcatcctttacacgattggactgcacactatgcgacgtatttgctcgatcgacgacagcagaaagctcgatttctagcttggcgccacctgatcactcatccccgatagagatgagtaaaatatcgcgtaagtaatacttgttttatagatgaagactgaaacctcggatcagccaatgcattaagatattcgtattggcagataaataactactagaaaccagacagatagaaccgtaatatatcatactttaagactatacgcaccatccgagtgtgtcaaccaattacgaagatgttagctgttgcccagagctgatgttgaccgattcattttcgcctcgccacttccactgggctaggtgaggcgcaggagcagaaataagcccataggatctaaaatcgcacatgaaaatggtgcagcctacgaatttaattacgacgcctcaaattgttcgagaaagtgccggcaaagactttcatcataactgaccacgtcgcgtttcgtagtacaaagccaaatccggccagccgctaaccgtgcaccttttatcttctgctctccagtttctaccccaacttcttgtttttttctgcggagtttaggggtcttatcttcttttcacatatccatcatgccgggctcattgcatatgtcacgcctccggaactggttcctcgcctctccgcctgccgagtacgccatcacaagcctcaaggaactgctgatcggcgcacttcaacagggccctatcccccagcatgtggcctttgtcatggatggaaacaggcgattcgcccgatcacatggaattgagacagtggagggacataatctggggtttgaagctcttgcaagagtgagtgctacattttggcagctcggcgttacacggcagcatccgtcttgtggccgaatctaacgactgatagatcctcgaagtctgctataagagcggagtgaaggtagtcacaatctatgcgtttagcattgaaaacttcaaacgctcaaaattcgaggtggatgcgctcatggaaatggccaaggtgaagctgtcacagatggctcagcacggagacctgctcgatcgatacggagcaaaggttcgcgtcctcggccgtcttgacatgctcaaacccgacgtcttggaggctgtcaacaaagccgtcgacatgaccagccgcaacggagaccgcgtcctgaatatctgcttcccctatacctcccgcgacgagatcgcctcagctatccgcgagacggtcgaggattattccacgccgatccaacacggtcactccacggctgctgcttctcgaaatcccttctcggaatcccatatcgcacataatatccgcgcccagacacacggctcgacaacacatgaatcacacagtgattctgagtctacgtcgggctcttcggggcaggatgatgacgcatcggttcaacacgaccacctcgaccgagtctacggatcgatgtcttcctgctcgtcttccacaaccctccacctcggaaatcagcaagaccccaagggcggctcaattgcgactggggcagatagcccggtctatatctcccccgaaaccatcacacgtcagactttgaacgaccacatgttgaccaagggtactccacccctggatatcctgatccgcacttcgggtgtcgaacgcctgagcgactttatgctctggcagacccacgagaatacggagattgtgttcctcaatgtcatgtggccagagtttgacctgtggcacttcctacccgtgatgcttggatggcagaggcggatttccaagtcccggcaggaccccaatgcggaggggaactttgccggtgaagcaaaaccaagtgatgaaggactagacgcgatgctgtggcgtcaagggggaaaggtcaaagacatttagtgatttgtctgtttatataccctgtgtctacttgcttttgttcagcttcagcatcactggcgtcttgctttttgcggagtttctgttgggcacgcctgacttggtatcagcatatatctatgcatcgccgtacactacattggtcttcggtaaataaaatatcatttacttcctaatcctcgacttcctatacgccagatccgtacttggatgcccacatttgatgtatgagcataggggcttgcttctacggctttttttcttccacgaatcatggatcatctttcttatccatctctccttctattacttcgtactatagatcacaatacaaggatgtccttctgattgaaaacatttagccacaagcagcaggcggtaaaacccttttgatgtccaccccgcgccgataccggttcacgtgatgttgagtcaccgtataccggtcccacagagaagaacctccagttgaaccatccgaacatcatctatcataccaattaattcaaaatggttaagcaaatcgccggttccaaggccctccttttgggttcaggcttcggtacgccccgcgcctctcttccagatctcccagacctaaatgcgcgatgctgccccgcatcgagtttgtagaggcatacatttgctaatttctgatttctcatagtcaccaagcccactgttgatgttctcagcaaggctggcgtcgaggtcactgtcggtacgtccaattgaatccacacgaacgcatattgcattgaatatcgctgacaatgcggtaacagcctgccgtaccctcgagagtgcccaggccctcgcctctggcttcaagaacgccaaggccatctcccttgatgtcaacgacgatgccgctctcgacgctgccctgaaccaggccgatgttgtgatttcgcttatcccgtacactttccacgctaccgtcatcaagtctgctatccgcactaaggtaactattctctagaggagaggaagcgggcaccgtgctaattcactataatagaccaacgtggtcacgacatcctatgtttcccctgcgatgatggagttggatgagcagtgtcgcgaggctggtatcacagtcatgaacgagatcggtctcgaccctggtctcgatcacctctgtaagtgtctatgccatggattcaaacagaccgacgctgataagaaatagacgctgtcaagactattcacgaggtccacgctgccggcggcaaggttacctcatttgtctccttctgtggagggttcgttcgaccagtcccatgttgtatagcggatgtagctaacaaacaacagcttgcccgcccccgaatgctccaacaaccccttgggatacaaggttagcaaaagtcccattccaccaatttgaaagtaactgacgaatggctgtttcaagttctcgtggtctaggttagcaactgtccaatgctgagttttcgcttgaacaaatgactaactagctcagccgcggtgtgcttcttgccctccgtaacgccgccaagatctacaaaggtacgtgcttgattcactctaacaggaaccgagtattaatgcacaatacagatggtgagatcgtgtccatcgacggccccgatctgatggctaccgctaagcccttcttcatctaccccggattcgccttcgtcggctaccctaaccgcgattctgtatgatatttatgcattcaaacgctttggtttcagtcaactaatctttctagactcccttccgcgagcgctacggtatccccgaggcccagaccgttatccgcggtacccttcgctaccagggcttccccgagatgatcaaggtccttgtcgacatcggtttcctcagcgatgcgcctaacagcgtcttcgataaggccacttcatggaaggaggccactaaggaggttctcggcgctacctcgtcctccgagaaggatctgcagtgggccatcgcatccaagactaagttccctaacaatgacgagcgcgatcgtctcctttccggcctgcgctggattggtctcttctccgatgagcagactatcccccgcggaaacgccctcgacactctctgcgctaccctcgagcagaagatgcagtacggtcccggcgagcgtgaccttgttatgctccagcacaagttcgagatcgagaacaaggacggctccaaggagacccgtacctccaccctgtgcgagtacggtaccgccgagacctccgctatggcccgcaccgttggtattccttgcggtgttgctgttaagcaggttctcgatggtactatcagcaagaccgtatgtttatccgtatcccctttgctctcgagattctctatactcacttcattatagggtgttctcgctcccgtgacttgggacatctgtgctcctcttatcaagaccctgaaggaggactacgatatggagctcattgagcgcactctgtaagggtgcagtcggatcttaatgaatatacttctagtaaaaaatataggaatcgcatagacgatgaatgaataccaaagtgtgtatttctattctatattccaccaaaccatggtatacaccagttcaatgttcacttggacgtcctagtcattgtgggccatatgattggatccgaaggatccaattgccacattggcactcttttgcgtatctgcactgaggtgtatatattaagaaggcgtactacacgttaaagaggaaatgtgatgtttaacctgatttgggattgatttttgatctgattattgttcgtaattagtacagtgctgcggaaaacagagcttacacgggcttctttatcagaagcagaacgcagggctccattcatcttgctatcagctatgttggaaggatgtcctgggtgtttttcaaaggacacccgacggcagggtcgattcgagagtcggccatcttataattttcgatatgctcgaaggcccgaagctgccacaatggcaaacaaagcgcgtatccagcacgccatctatcaaaggagctcgagcagatcaaaacgtaaacttatcttcattatcatagacataacaccatttctcttatcatagcatcattgcccaggtgtgccccagcagaccccaacgtacaaccgcaagcgggggtctcacgggtggaaaagaaagacacgaagtgaaaaagaaagcagagcgaataatctagctgcttgcgctttttgcgatctttatctgtggccaattcacggagagagagaaagaggaaagaagtcttttcggacgtatgcattgttttttgtgtgtctttcatgccaccggtaagagatgtattcgatcagagaatactgccaaacctacaccaaggagaagaacgaggatgattagtaactgattccagtatcgcgagggttttgcgggaggttgagatctgtagacagaggccagattggcaaagaagtccagaagagagggataatccgaaagagatgaatgtgtagacaaaacaaataaagggggagaaagaaaaggagaaatgacatacccaaaagtctgcttaatgctgcgaacatagtacgtgtcccaattctgcttggtgacatcctcctggccaaccggaacaccagaccaagaaacacgcatctgagtaacaccatcgatatcattctgatcgaagttgatctcctgcgaactgaagtggccctcgggccactgagcaagacgccacttctggacgatctgcttgggctcgttgagcgtgacgaactcgccagtcacgtttccgtcaaagatagcgaacttgccgccaacagtggcgccatcgaactggcgcggcgcgccgcgcgtgaacgctgcgatgcgctgcgggtccgtgaaggtagtgtaaagctcggcggccgtggtgcggaactcgtccgaggccgacacggtggttgtgttgacggcgaccttaccggtcttggaggtggtggtcttcgcggctggggtgtcggccttggtgtgcgggtggacgacggccttggggaagccgctggaggggttctcgcccggggcgtgctggaggtccttgccgtgctcgttgatcagggcgggggtcaggccggtcagagccttgcggatttcgacagtaagctttgtgcgcaccaggtcctttacgggctgcttggagttggagtcggcgcggttttcaatctcgaactgcagacgggagtttacatggttagtattacagatcaccttggcgattggggaatgggtcaattgaacatacgacgtactcatcttcctcggtgtcgtgggctacctcgggaatgttgatggtgccggtgacatcctcatcgtccttggtcttacctatggaagcgtctcagctgccaggtccacaaagaaaacaagaaaccgagataaaatgaattgatattggactacaaacctgagtattctagcgagaccttgacatcgaacagagtgatgaccttgcccttgcgctggctgacatctacgtcgccatccatggacaccagcttgtctactttggctgacacgcccccttcctcgacactgaggccgacaaggttcttttgcaggaactccttggcccagccagaggcatccttgttgacccagtgccagttgttggggttgtgaaggaccatgatgaatgttgactaggggaatgaaagaaaactctgatttggggttggaaagtggatttggaaagtggattgcttcctgtttttgagaaaaaatattgctaaaagttctgttggaaattcctgttagccatgatctttcgcaatggatgaaagttgcatgtgtaaggaaaggccaatgtcaggtctcggggcgtatcccggacttgttaagcgttgtccgcaagtagatggagaatcatctctcagactggtgccagctgaagtctcttcatgtaaggccaattgagtgacgccgaggggcaggttggaaccccacacccctcgttgcactcaagagtgaacgtagtaaaagcacaaggtgaaacttacagttggtgtaatcaagtccaaaacatcaaggacatcaaggactctgaggtgaagtaaaagaaagaagagtcgaggggaaagagagctatttgaagggccgacggaagactctagaaggtgcacgtgactgtggataacgctaacgatttctctatcgccattcttcttcttcgctaccagctgtattctttggatttctatatttttctagttgaaaggagctaggatatcatcaagttctagggagatagaccctcaaccaccccactttacggtaaacgacgttattttcgcatataggctggtcatttgaatataagtatccacaggtatcataccacatggcgctcctctacggatggttcgactatggtttgcttgcttgcgatttgcgatttgcatcttccctttttttggtagattgtctgctagctaggcgagaaatcgatggtttcatgtttgcagaagcggccagctatatataacctgtttcagcaccctctctctccctctctttctctctccgtcttagttattttcaactgatgcactctttatgatctagcacgtcacacctcgtactcaggctaatctacatcccaaagtatgatcgggttgctgatctctgacaggtctataacacccatggatatgtgcgtgtcatagtagttatgtgtcatactatatcaatccctctccctcccacaaaatatcacgccttgaagatagtaactgaatgaacgttcactatggctcgacgctcttatatatcttttcgcaatattttgcgactccgtgatccacccagggtcgaaccggtcgaacccaagaggtccaagacactctggaggatcccagcagaaatagtggaaatgatcttccagcttctttccgatctagaccgagcttgttttgcactgtgttgtaagaggccgcatgtctgctatgtctcacataacaaacaatatagaatatctgtactgtcgaaattgcccaggacgttactacttcgtcgccttcaaaacgaacgctgggtatactgtcatagatgtcaaaatcttcaccagaaccccagatggcggtttcttagctggaaatgtgatccccagcccgctatatccgaatgcaatgcttggtgcgatgtccaacacgatgacagcgttgacatatgtccatgctcgagtatcacattccaccagaagcaacatccaattgagtactttcgatctcaacaggagactttagaaaaatcagattatcagaaatgatctgggacatttacacatccatgcactgttgagcatcctctggcatgggtgactatcctaactacagctcggttaaacaagtctaccaagactttccaggtgggaaatcagttggtcttccagacttctaaagaaacagcttcgtcggagctcttccaaaagatcggctctagaccaagcaggtatgaaaccggactttggctaaaggacttcttccatgatcaatccaacttcttcattggggatgagagctctaactggtatcaatgccatggctggagcattgcaaagggcaagccgtataacttcaagataacgctacatagagacctaaggggcgacaggaggcctagcaaagggtgggaagacaattgtcataattagatgtcgtcttctagattgctctttttgctagccagccttggtttttcaatttgtattaacttccttatttcaatttcataatacttcttatgtgatttgcatagaacatgtaggtactactaattagctaactgccagctatatattctttaagatatatattttttccggctgaaatatgtatattcaactctcacatccctgaaggagaccgaaaactcaagtgtcgcaggcactgcctcgcgtcaatctataacgaacgtatggggatatcacgctgccaagtacatagcaaagaaaaatcacaaaagccactcttctattcctcctattcctccaattgctccaattcctcccagccatcttcactcataagctgttccttcacccgttctctcaatccctcgatctggctccctagcgcctcagtccactgaccctcaacggtagcaaccttatccttaagatccgtagtcagagccagctcttcatcagcactcgtctcctgcatttccctcctcacatcttcctccgcctccccacgcttaatccgctgcgcctccaccagcttctgattagcccgcataacagcagaccgcacctcatgcaacagacacagcagattcgtctgcgactcaatgaactggtagctcgatttctctgcatgcgacagcagcgtatacagatactgcagcgggtgctcatggtagctcgggttttcctcgtattcgtctgcgggaatctgcacccggaagccgtgcaggtcctcgggcgcctgctgcacgagagcgaggagggacggggcgatatcccagaatgcggagagctgcacctcgacacctcgcatgacgttctgctcgatgacgtccaggaaggtctcgagccgagttagcgcctcggtttcgtactggacgcggcggtcgagtgcgtcctgcgtgaagaaggcttgcgtctcccggagcttgtcttcgtttttggtctgcttgtaggggagtaacgcgacggctttgtatttgtcgtcgcggtcgctgattaggtcgaaggactcgcggtggagctgctcgcgggcttcgaagagccattttaattgcgttagtttttcgaggagctcgggcttctcgtcgccttcttcctgtgtttgatctggtgtcccgctttgtgcatcgtcggagagcatgctactcagctggtcgatgcaggttgtggctctgttgattctgtcgacgagaatggcgtgcatcggcttgagtactgtttcttggtacgtgtctagctggcgtttgaccattatcctttctcgctcgttttcttcggcaatcattgctgcctcggcctcggctgcttccgcaaaggtgagactgccttcttggatctggctttggatgttcgatctgaagtggcgatggccctcgtcgacttgttgttggtgttcttgaagcattcgctccacgtcggccttatatcgatgtctggtggttttgatctccgcgagatcagtaattgaccggacggtagttcggtgagtaaccaaatcaggatggctgttattcacagcaggatggtggcggggataaggcggaggcagagtaatcaaccgcgagatatctaaattgcggctttcttcgcgatacccagtctcgatggaattcctgggagaatcttcaggccagctgactttctcaggcggatactcatcagagccatactccgtagtcgcataattcatgctcacatctttgggctgagaaggagtcaactcctggtcccctagcatggcctcccgaggcaatcccatgtacttcgattcccgcttggatcgttgaacccgcctctcacccccctcgccgctggaaccggttgctgattcccaccagcgacttggtgcacggcctcgggagctctcctcgttgctcatgttaaggctggcaatcggcgacaggcaaggctgatagttattccaccacgcagactccggccgacctgctcggttttgtgggatatcaagctttggctggggcttgggcttgggctttggtggttgcttgactggcaattcgaaaagattgcggcgcacatcctccacttggaaagattcccagaccttggcgtatcgctgacgccggatctgagattcggcgagcatgtagtccgcaaatattttcagtgcttcagtatcatcctcggcactggcttctttatcaataaagatcttgtgcctttgaatcgcatcctgcaggaaagcaggatcttgtctaaggatcgattccattgacacctgcgtcgtttgctgtcctggcgttcggcgtggcgataggggtttcattatcgatacggcatcgttaggcatatggagaatatgagagattggacggtcttccggtccccgggatggtgcacgggagcgtgagcgtggccggacctccttcgctgaattgagagggggagtcggtagtgcctttggtggtaccgcttgggtggcttctttgggatatgttgacgagcccagcccatttggatttggcgagaatggaggcgtatgtgcaaatgcagtcgagggaccagcagagctaggtagttgtctgggagtcgtgtagggtgattgttctgtaacgacagcactggacgatgctcgaggccgcgtggcaatatgttgtccttctgatttaatgctgcgggtacttccaggggtttgattgtactttcccgacgtcggatgccgatcttgacctggactactggtctgttctggtagaatcaggtttgacggtttgatttgctcgagagcatcggcccaaggattaccatttgacgataccgcacttgggggttcaaagacctgactttgccggttacgtcgttcaattcgcctttcacggatgcccttcgcactcggatcgcggactgctgggctgcggaaaagaccgccactaccgggagttctttgattcgatgaatcgtggggatctccatctgtcggctctggtgccttggccgcttttgccgtgtcaacatataaattctcggttggtcgactgttcaaatatccctcgtctatccagtcagctggtgtaggagggatgcttcccagtcctgttcctagcacgggaggtccccttcttgtcgtcctgttcgagctctggggcgttctcagagatgattctgatgagccactcacgctgacggaccttgcagcgggaggaggccctggaggtggcggtggaagtggcatcccgggctcccatgtactatttgacggcgatcggtttcgcgactgactcgttgcccttgatgatcccgcactgcttaccacagccccagcagatgcggctcttcgggatccaggggcacgcgacggtgtctcaaagtgagcaggtgttagaggcatttgttcgttaaagccgggtgacggttggccctggtcatactgtgcgagccgaggcctgagactagctgcagcattatattgcgtttggtcattatagggcatgccatggtactccactcgaccttgagaaacagatctactcgctggatgtccctgcgggggaggtggaggaggtagcgactggcgctgagaccccaagtcagacgagtaagccatagatagcggccggggccggtttgagcgtctttgatactggacaggcatatcaaacccacccgccctgttgtccggtggagaaggcgttccggcaaagttagaatttggctgaccagaaaagtccggggacgttcgattttggttgctggggggtgagtatggcggaggaggtggagacagcggcacatctaccaaagtatcaatatcacttcaaacgggtcatgggataccactggtctgcagaggcatgagctgtgagcgagactcacccggattatttctttgcggcgtcacacgatgcatagcgcctggctgaagatacggggcctgcgactggggcctgcccggaggaccccagtcctggggattataaggaacattgtatgcgttcctagacgccatggaagacaatgaaaccgatctgctgttaacaggcgatggaacagcaggcgatagactgtgcgtaaacgggctcgaaagcgaggttgacgatgaaggcgtcggtgttagtccaagaccctggtattgagggccgctcaatgctgttgtcaacaatggcggctgtacagcatgctctcggcgaggtgacggctgattgctaggactcgcagctgtcgacgaccagccggggtaatggttgctcagcggctgctcgacacctgcatgattcggacccagccagctagagagggaggatcagtatatagaaatacccgagaataagatgggtcgcacctattcatattgggctgtgcatccatttaggaggcccgttccgaagccatggccgcctggaatgaaagaggataagccaacaaaacagaggaaaagctatcagcttgaaacaggcgagacgctaaatttttctattctttgcaactgcggagagcaaggttaggggaaacgatagcctagcctatacggaggcgtgctccgtacggcagagtctgaaggaccatacgatgtacgggaaatgagatctaaatttggaacggaagaaagaagaactcgatcgagaacaaatgagcgcaggaggaagcgggggattgttatgcacctgagggcattctcatcacattcgcggcccaagctcagcgcttatcgttctccatgagaggcccaacgacggtgtccccgcaataaaacaacaaaaagggcagggaatatctataaaaagatcatagtttcatacattttaagtagggatcagaggtttctcgaattcttattggtattttccattaaactcccaactaatgcagccttccataaaggaagaccaggatattatcatctgtcatgtgccgaggcaccaggagactgctccgatatcttcgaattgttctgaaaatcgatattagtgtcaagactaacaagcgatagcaagaaacataatgtgtttggacaaatttcagataaagccttgtcacaggcgatggtcgtcaatattaaatccttacgttgaccgtcgtgataaattgaagtgaatcatcataaaaggatgagggaagaaagagaaagaaagaggtcaaaactcacagaaagaaggcaaagcagaccgccattggcgtctgcaattattagttcgctaaattgtttctgttcgagatccatcagcgtcgagtactgaatggacattgcagcaatgttgagactcgtgaattgatcaggcatgacagtttctcgtcttcgccagcaagctgacttggacatatgcttgtcttttatgtcgtttcatcatgtaaagtcgggaagggaaggagacaaggtgtacatacacccacagtcagtcgagacaagagagctcttcgtagttcaaggagaatatctgtcttcaaaggatcattagcactagccaaggagatttgatgagtgaaattttgtgtaggaatgaatgtcagaaaggcatgaatggttattaaaaagattgtgtcagcatcgaaaactcgaatcagactcgtcatctaaagggtatcatcatagaaggtagggcagcaagaacaacaagactcagtcgcataccttctacagttacagttggatctcaatcgggcacaatcaaaaaggcttctattcaaagggttagtgactgtgtcacgcaaccgtctcacgagtcgatgaatatatggtatgtctcagtgggcgaggttttctaggcctgccgcaaaaaggcgtctccaatcatgaccggacatttttttaaacgccgtcggagcccagtgccgtttcatcttcggacagagagtcgtgtaggaaagatgctttagtcttaccatttgagccagtagcgcagtaacctataagtcttcggaacattagcttatggtctgaaaagaattttcatgcaaatgttgagacaaggtaaagatcagaaatagccatttgtatcatcaccgacccgaaggtctgagacggtaatttccagcgtattttcatacacatcgcgttcatcatgatataggggaagggtagggtaaagagaccagggtaactcaccatctgcgcttgttgtgggtgtgatatctgcaaccgataagatgtatttactatcatttctggaaaggcaagttagctcagtccaactcaaggtttgtgtgatagttcaaagcaatgatgtgagatcagcctgacgtgcaataacataagtttcattccccggagggtcaaagactctagtttgtatttggttaaaggtatcatcatgttgaaaggtgcatagatgtgttagggatgaggacaaaatcttaccatcgttgcagatcctgtcgggcggctattggttagtgggaaacacattgtgtcaaagattatggttggctcaatgccagacatcaatcgacctcagtctccgtgtgcattgggatcattaaccatgctgaagatgagggtaggatgatgaaggagaaaaaagtgaaaacagaaatttgtacttttttcaagctctgacggcgcggaatcaccttcagccggacctagcctatattgggactagccttgacataggcgagttctgcttatgtcacccaccccaacggcctgccgacttgggaataatctagcattggagacagctacaacatacaatatacaacatataaaaaaggaaaagccaaaaaattatcataatctattgttttacagctgccagcataataaacatctatgcatgggatcgcctcttttcgcgggcccagaactgatatagaacagctagcatagctagcatgcacacatcaagggcaatagtccagttatatccaataaggtaccttggagcatcaacagtcttccatacactagataagaaatagattagtataaagttcaggatcagcaggttgcaccaacactcacaagagcggaatccaagccccaaaggtattaccaatagtattcatggcactgatgacaatagcacgctcctcggcactatgggcacagatctcatttgcccaggcatagataatagctgcaatcccatccgccgtgcctgacaggaagaacgcaaagaacttcagtccaatagggacattccagatcgctagcacaatacaagcaaagatattcagcaaagcagtggcagcaatcaagctagctttcgcatcgtacacatcagagagaactccacagatcacagatgccacaatagtgaccgccggcgagactgtcgtgatcgtgttgatgctctcgaccgagtatccctcctccttgagccagattggcaagccgctgttcgaggatacaccatcggcctgcgagaagaagaatgcaaatccgactagaacccacagccgccagcctttcaggatctggagaaccctcgacttggtgaatggttgacgggcttcgcggttctcggatgccatgcgctcttgcgcgaggcggacttcgtcggcgctgaggaaacgcgagttgcatttgtctggtgtgctggggaggaggcataggcctaggaaggcgataggaattgtgcatgcaaagcctgatatcattagtctgtgtctcttttgttccttccttttgcgagacacttcggatacactcacaaattatgtatagccatctccacccttcaatcccgtaccgaccgtcaagcctggcataagctcccgcttgaatgtatcccgaactcatgctgccgacttgggaggcaatgaaaaagattgcgcctcggcgggacagttctgagcgcttataccaactgcccaggtaccattgcacggcagggaagaagaagcccccgagggcaccaacgaaaaagcggagagcgtagagctgggtgacattgctagccttgtactgtgccagagtgaagacaccccagaatagatcggcggcaggcaggaaatagttcacgggacagcgagtcatctataaaagacagtcagtaaattattgtctccatggggtagattctaagtgacaacgaaccaacaaagtcaaaggaatctgcatcgtgatgaacccaaccctataccaagtcagcatcaaacctcaattcacactccccgccaccaccaacccatcgtataaacatacatgtaaaccgtctgtagataatttaattggttcccataaagcttcaaatcctccttcatgccagatacataggctgtactcgtggccgatgaatccaagaccttagcccagtacgccaggaagacgaagacgatgatcaatccatcgagcttgaggatcagccgccgctcggcaggggtatccgtcggcgcaaaccactcataccatttctggcgtgcaggctcagaaccggacggatgctctgttttcgtggggttttcctcggctcccattgtctgcggggctttctcaatgggtagagaagacatggttgggtatttacctctaggctatgtatctccttgtgataacaacgctagcctctggggtatagggatacgacaccgccgatcagatatctgaattcgcttcatttttttccccttgggtgctttgagctgttatagggctgaaacggagcacgccatcggccgctagaatgaggagtcaatcaaattcgccggtaaatttttgacgctatcgccagaaattgcatcaagcaatgccaagctccgttctgattcgttggggccttggggtttgacccggggaaaatccatggataagtgttgagatggtcaagttttgcacttgaagaaggccggtattgctgtgggcctgggctgttgtggaattagtcaaggattatactcgtagatatcaaatcgagtaagcgtgttagctagcgttggaactatgcaggtgtagatgttgtgtgggaccagatctggtggcgtacccatctctgcacggaggtactccgttgatagcactagagaacaatatgatttaagattttattttatttttaatcccaacttgtgcaggtataactatcgtaaagcgctgaaaagaacaagactgcaacgaggcagaggtcgggaaaccaaaatgtaaaatccgaccaaaatcatcatgtccaagaatgaggtaggaataactagtgttaagaggatatatgcagggagaaaccagcatcctgaaagaaggaaagaacgtctcagcgagacgcttatttcttgtacttgttgtacatatcaatgaccttctggacctcattcttggagccaaggaagacaccactcttatcgtggattgtctcaggaacaacctccatcaaccgctccatgcgcgagttgacagcaaggccgcctgcattttcgaagaccatagccatgggcgcacactcgtacaggatacgaagcttgcccttggggctcttcgagtcggccgggtaggcgaagataccgccgtatagcaaagtgcggtaagcatcggcgaccatgctaccaatgtaacgggcgctgtaaggcttgccaccgtcttcgggatacttgaggctatggaagtaggcgttgcaccactcgtcccagtacttgctgttgccctcgttgacggagtagatggagcgcgactcgggcagtctcatgttggggtgggtgaggatgaactcgccgagggagttctcgagcgtgaagccgttaacaccgccaccgcgcatcgtaatcaccagctgcgctgaggcgccgtacatggtaaagccggacgccaccaggctagtacccgggtgaagcaggtcctctgggccgacggtcttgttgggacccaggagctcgtcgggaagctggaagacaccaaagatggtgccgacagacacaccggcgtccaagttggaggaaccgtcgatggggtcgcagacaacggcgtagcgagcatcggggtgctcgtcgaacctgatcacttcctcttcttcttctgagacgataatgcggcacttgccggagccacgcatggcagagatgaagatgtcattgccgatcacgtccagcttcttctggtcatcaccggttatgttcgaggaaccagcgagtccggtaaggttgatcaaggaagcacgacgaatgtagtaggcaattgacttgaaggagaattggagggcatggcacaggagtgtgaaatctccagaagcttctgggtacttgatctgttcttctgtgaagaatcgagaaagtgtgacaatatcagtgttgatgttctccgctccaacaggtgctgaagccattttggggtattgtttggaggatataggatatagagattaaaaagcgtagcaattgggtttcaggtgaagagtagcttaagtagcaggcgtgtggcaatcttgaaacaaggcagacaaggtaggagaagcagtttaacgtcagtgagcgggggggaattaaaccgggtagaagtatggggagtgacctcagtcccgttttcgtcatttgccccgcgtgacctgcccgggccctcgtccttcgcccctcgcccggttttccccctccctcgccgggaacgcccgtctcttaagtatggagcttcctatcaaaaatcactattattggtgatcgctgcacggattggaccttgtagcgataaacccctacctccctcccaaattagcttcacacccatacaaatatgtccaagctaatctgagatgtgctgcccaatgatctagatcctcccggtctgtcccttggccgactcggcctcgggatcagcagcggaagaagaaatccctataccccacccacagtcatgcgcacgtgaaaagatcctgagatttaggtaatgccattgttgtgcccaattaaagggggatatctacgctatggcgatagttcggtgtggatatatgtggcatagatcggtacaatatagataatgtataattctagaccctttacaatacaaaaaaagaaacacggagtgagacaatcccgtgttgtagaaataagaacgaatagactagtccacggggtcctcctccaacagggtcttgaagctgaaaggcaggaaaggaataccctcaccaacgaaatgcttactcattgcctcaacccagtgaagacggagcgagtgcaacatggcactggtaccttccatcacacacagaatgcaaatcgtcagcacaaaccagaggtagaagctgacaacaatcatgatcacacgggtcacggggttctcctggtcaaaggcaccaccaatggtcatggtccagagaacgatcgaaagttgctggtgggcaagcgacagagcccacaaacgaaggtaagaagcagtgtgagagatacagttgaggcagaattcgatggtgtggatgacttggtggatcatgatgtcgccaaagtcgaactcctcatgctcttcgctttcatcgatgtcctgagaaagcatggccacgccttctccgtcgctagccacactgtcacgacccagcccgccgtccaagtcaccatcggcgtccagtgcgctcaccctggagttctcgccgaggccgcggtaacccaaggcacgagcgcggttgtgttcgtagcggagccagagaggcttgaggaagagcatcacaggtacctgggccacagcgacgaggagcagaagaacctggaccatactctggccaggatagagttgttcatccaccgtaccagggctgaggaacatgaaaatgagcatgttgaggagaccgggagggttcacacccttctcctgccagttcacggtccacttatagagtatagtgaggacaagataaccaaagattgactggaagaagagcaatccaggaacaaaatttccccagatgtcaaccttagatctgaagtaacgtccattgacgtattgcaagcaaagggcataggtcatgtggcaccatccaaggagaacgctcatcttcatcttcatactattcgaaaatagcaaggagttgtctgcttcgtgccagttccagtccagtccaattggaaagcgatagccttctctcaatgttgcctcgaccattttgccgggcttgatgtcctcgggccattcccactgactggggaagaaggtgaaagatttggagaaaatatcgttgtaaataaaaccggtgtagatcgagaacagacccatcatcaacataatataccgtccatagaatgccatgtatgtcagttcatccagtttagtccgcgccagcttcttttcccagaaaatcatagcagaagcggctagagtcatcagtgcaccgtgaccgcaatcaccaaacatgactgcgaacaagaagggaaaggtgacgaccgtgtacaggccaggattgacttccgaatacttagggataccgtaagcattcacgattgtttggaacccttcggtgaacttgttcgtcctgacaaaagtcggaggggtcttgtttgttcggatctggttgacgattgtaggaacagtgaggcccgcgcggtcgttcacgtcctggagggtcgacttgatcagagcaagagagtttgtcgggcaccacgcctcggcaatgagcgtcttccgcgcttggtcgtatgagaatttgttcaaggtatcataaacggccttctccttcttgacaatgatcatccaggcggcgagcgagcgagcaatttgggaaagttccgcatcaagggtgttcttggtgttacggagcacattgccaacatcgccgagacgggtgttgacttcgtgaatctggtccctcctcaactcactgttctcatcgacaccgtacaaggaggcgttgagcgactccgagattttgcggatcttagcaagaatgttcttgccatgagcgaagatgacgaaaacattcttgtggacttcctcgttcgtcattgggtcgataatgggctctggaatctcggactggttcatgtagagatttccgcgcagggtacgccagaggatacgctcaaaggctccgatgcgatcccggggaataacaccagccacgaatccaatgttcatttccgagaagctctgctgaccctgagtgtctccattttgatgaggggcgtgatgctcgatatcacggagcagaggagcttcatcgttgtccaaggactgacgaatgtcttctgtttgtgtatgggcctattcagttagccttgtctatcaacggtatactcgaggcaacttacccgatcgaaaaatccaccggcctctctaagtacccatcgccattcgctcagctcgacttcacgtttcttcaaagtctcatagctatcgttcagagagataatccgctgttcaaggctctcactgcgatcagccaactcatcgatctccgacgctaagggggcggccaatgtatcggagaaatccgtggaagatctcatagggattgcggccttttccgtctgttggtggaaatagcggagctgtctttcgacattgtccaggcggcggatttcttttgtaaaggttctttggaaagcgttcgtgtccgggttgagctaggaagacgttagcgggagtatcaaagcaaagcgctcttcgtcacttacatctcggaactgaacctggccaacttcacccaatgcactgacaacttctcttccgatctcgttggcaatatagagctgggtcaagctcatatccgccgagcggaagaaggtgtcccgtggaaccatggtgtaatgaggctaccaggagccgtgtctttgggaagaagacagggaaaagtaagaggcaaagagcgacagtaatagatagattcaatgagaggcacagatcctcggctctgttgttgcgaatagtccgggctctacttgcactcgttctcgggtggctctgtcaagctggctgcatccagccacgtgatttagtttgcacgtgatctcataggacgactaaactaaacaaaatgtctacaatatggccaacctacaaatagtaactaaattcctttaaactgctcctgggtagatgaactgatggcttattatcatgcttcgtctttcttccattctaggagtctgaatcagcaggggatctgtcctaatcacctatcggtgaataagagctgcttgccctaaccgatcatagttgaggaacgagtatgccatctcatactgcaaattattggtagtacgatttattgggacccgtatatactgacacagtgctatcggaacaagctgatgctttctatctatgttgtttttctataatccttcgatcgagtccctagttgacgtttccacttgttaggattaacgactttctcatgtcaaaaggttacaaagtcatctaggagatcttttaatcgaatgttgaagtactcgattccctaacatgttgaataatttcccactatgtcacccccagtgacggttcatgtttagaaagtatggttaactacccagaccttcgagcgtcagaataccaccgaatgagtcgatattccacctatcctactacctgttgggcttttccaactcaaaaagtgcaaccacatcaccttcaatcgactgctcgcggtagatactaaacccagtcctctgcagcaccttcacactgccaacattcgctctattgcacgccgcaaacagcttctcctttttcaaatccgatccagccccgtcgaaatctatcctgtcaagcttccaccacacatctacaataccagcaacggcctcagtggcatagcccttgccccagaagtcaggatggatattataccccactgacggggctggactaagagcattgattcccgctcctccaataaccgtctgtgacgagtccttggaacggataatggcgaagaagaacttccgcccaatggcacctgatgcatccggggttgtaaatgtctttttggtaatgagggcctctgactctgatatgtctttgtggggtactttgggccagctacagatatagtcacaagtcagtacataactctcccgggttgtcgtggtggttgttctttgggtataatcttacagccagtccgctacgtcttgtcgtcggcggatctcaaaaatggccgtggcgtcagctaccgtcaatggtcgtagatacaggcgacttgtgtggatgggtctcaaatcggccgggacgatcacggatgtagcttgatcggggtagaagctcatgttgacggaatatgcgatgttcttagaagctgattcttgttgggtatagaaactacagttatatatattctgcgtgagtcattcgcggggctggctggtcaggctggtctacaacaatatcccataccagcgatatatacaacacataatagagatgcaatacaacaggacagcgaatacattttgaacagacctcacagaaatatattgctgtctagcttcgaccaccacgccgggatagcgcatcttaatgctttcgaagctccgatatacagtgccgcctcaccaattcagaagcccagaaattcaaatcaaaacagtttgaaattaatcatttacactcataatatatagtcggtggaaaaacgaaaagccaaccccatcgtcacggatagacagcagctcccatagagcggagtcgacgagcacacagaatgtacagccacagatcagcttcgacttaggcaccgccatccctcttcgcgtattcatcctccatccgctcctcgtacaggcgatcggcctcctccttggtcagagagcgaccactatcagcattctgcgacgggctggctgagtttccaggcgcggtcccgaaatagctgttgttgttgatgtggtcaggggcagtgtgtgaagcggagctaggaggttgtgtgcagttggcttggctttgttgcttgtcaaagagatcggcagtggggacgggcatcttggttcaggttgagtgtttaagtcgcgagtgcggcagtgatttcgaggaaaacagattttcaaggaagtaagtgaggatggtagactaggactcgagctgttgcgatttttggcttcggtaggatttcatgctggttttatgctggctggcaagagttgatctggggtcgccacagatgtggcgacgccactgtgagtcagacgtcatgtcaacaaaacgcagctgagaagtgagatttcagcagtttacggttggtaggggaactggggattggagattggacgctggagactggatgctagacactggacataaagtaccgtagaatgaagacgagatgaatatgccatcatttaattactgatcgcgataagcaacaggccgttgttgatgcgtgccgagggacgtggggacttggcgcaacggtcgcaccagcgcaagggtattccaagggacaaagttacaattacaagaaaatgaataattgccattagagcttattactatgatctacgaattacatctcttctccaaactcgagccactggctcaaggttgatgaaaagagttccacgaaggagagtgccaaagaatgcgcctgtcaatgaccacgagagccattgaacaaactgttccaccacgatgtgcaatgcagggaccaatctgtggtgacacgtcttattgatcacggtcacccaaacaaggtaagtatgaagaagaaagaaaaaaagaggaactggactgggaaaacgcggatatatataccctagctggaaagcggtggcagattcccagattcgccacctcacactgattggtcagcaaccgaagcaaatatgagcacgtgacactgccaaggcccaaccgcatgtgatatgactcatccacctccctttctggacattacagacctgtcaggtcagggcgaggaatgacgctacggagtatgtacagtgcaacgtgcaggacacaggtaccatgcatttctttcctaggtttcatgcttgcgccagagtgagaatgaaatcatgaaccatgaaccaacacacagacctcaaacatgaatcaataattgaaacctccttgttcgagacgcctcaaaaacaagccagactccatacccgacccgagcttgtgtggatcctcccctatcccacaactttgtattgtggctctcacgtcccgtactactcaaaagtccgaaagacgtttggatcacaacttgtttggaatacggtctgtcggaagtatacccttattcagagggttctacaagattaactcgggtgaggaacccacagttaatatcgaatagcaagtaaacgcccatccttatcagagtgtgccatggtttgagtcgatctagtggacgctagagtcgtcggggcttaaatggacgggaaatctgtcccttgtgtacaccgcaggtcaagctggcgcttggcgggaagtattacgattaatttactcggtaatgagctcgggagatatattctgttcatgaaagtagagtcttgctgtggtactatattttagtttttttttcctgctcgaaacctatagttacatgcatcatgtacggtgcaaatgtaagtccctggaacaatcacaactacaacgagtaatatggagccatatgtactccgtattccgtatatgcatcccgaaaaagcgggaaagaatccataggcgcccgggttccgctatgcatggcacttgcatggtgtcaaaatatagcccaacaacaagagaggagcaaagatcgacaagctgacttggaacaatgatgtgatcgtcgacgagcggtaaacgccgaccattcatgggatgcagcaggaggagggttgagcctaggacctcgcgaccgcaaaaaaagggcgaaaacggtaggcttggtacggacatgactggtgcttagtcgccctagaggtctaacgggtgcaaaaggggggccatgatagggcatgatgagataccgagaagggggtggattcccccgtgcggctatcattactggaaatgtttcaatggccacattctggcagtgttgggctgcgacctgatagtgcttgtcctgaggtagttgtagatcataccacctacctccggagatataaggtggtgccataggacattgtacgagaagaacagcgtatgaaggcactttccgttctcctgcagacactatcttgtcgatgaaccgtggaaatgaggaaatgaaccgaataaagtgcttgatacctacactgagtttgtagggctggccccttattcgctaagactcgaaactagatgcgtagtccggtggagactactccgtacttcgtgttgtacgtacttttttgatatattatcaccactaagaaatctacggggaaaacatagggggatgtaaagggtgacagaaaaggggcttaattaggggcatattgtccaagcgtgtagatcgtgttttcagtttcaactatgttttcctgcaccataagagttactttgtactccgtatgctgtactccgtggattagcagtatgagacgatcctggtatggaatgatgcgcatatcacgtaaagaggcgacactttgtaaatgtgctgggattggctagacgaaaagatcatgggacctttcccgcagcgcggcgaagacagttgatacgccgatagggacgtacatcaaagccggagtcaagaaggaggggttgtatcactgctggttggttgtccacgaggattcgcacgccactacatcatagagttgatattcggtcatggggcctgagtaacgattggaagtcgtgatggccaaccattgtagaacctaaagatgagtgcatggcccggtagccaatacccggcctaagccatgtaaatgcgacaaagttcatctacatagacggcgcactaggctgatcatgacgaagcaaaatgacgggctgccttgcggtgatatggtgggggtgggcatggagtacagggatgcccctccaaagggatatattctagtgccgatatagcctttccgagggagaggcttgcaaggtcggatctacttttgactacggagtacggagtatgcggagtaatacagaagaaccatcgaaacatctagttgatttgacaatgaatggattcggtaattccaacggcaacgccccccttgaactgtgtaacggcgtagttgaacgatgtggaatgagcgccaacggtgtggcgacccaccgaagaatagaacctccttacgggccaggaagtcactaactaagtatacttttcttgtgtctgatgacctgacaatctaagataaccccgccatgacgatatatttttcttgtatactctatagaatatgaaacgaacagaagttgacttttaaatcggtaggagcatccgaagtacatggagtaataagcgagatgtgaccgttgattcaagctgcatggccgatcatggcctatggtgtgatggtttcatacagtgcaaggccaagaattgcagagttttctttctcctatttgctgtttagttcctaaatttagttggatcaggtctagcgtcacggacaaagaagctcgtgttatcgtaagtattcttagggcatagattggcacacttccaaggttgtccatggctgttccacttgcaaagttagttgcaaagcgtatttggcgttacacaggagactgatagagtgcaaaaacagaatggaattaaaaaaacatgtcaaaagggtaatgagaatgacaaaatacagcatccatggatgaaaaagacatggcccgtaaaaacagaacgcaaataacggaaaatgacaaaaagaaaccaaaaaaacaaaaaaacaaaaaacaaaaaaaaccaattaacccctgaagcgccattagctaatctttttgtgggtcccctgagctctgggctccctgcaggtcctttccttttcagggaggacgccatcaacaaccctctgactcttttttttcccttttcctcttctctctcttctctcttcttcctcccacaaagcaaaatacccttacttcgtgatacccgagctattgtgctctaatttcttttgctttcttttgagataccctatacccaacacgcctattttacccctacgaagcccagcttctttaatacccgtttattattttaatcatgtctgaagtccagaagactgttgaggagaccccggtcgtccctaccgttgaacccgccgttgagactcctgccaccgaggcagcggtcgaagctcccaaggagaccactgaggaacccacagccactcccgccattgagagcaccgaggcttcggagcccgccaaggaggaggtgaagcccgctagcgagggcgttctcggccacaaaggccccggtctggtcaagtaagttgcgactgagatcacaactgcgacacggagactgacaagtgttcttcgtttcttttaggggcttccgcttcgtcaagcgcttcttctacttcaacgaggaggccactgagagcaagcacctctccgtcttccaccagaacgagaagtcctccgtcgccaaccccatcgccgcctgggccacccagaccggcaagggtctgcttttcttcaccaagcgcgctgaggacaaggccacccccgctggcattttcaacctcgtgagtgctttggcaactgtgatgtgatgcggcaaactctaacaatgaataggccgatgtctctgacgtgaccaaggagggtacacacgagttcctcttcaaggttggtggccacaagcacaccttccaggccgccaacaccgccgagcgtgacagctgggttgtcgctatcgaggctcaggccaccgaagccaaggccgagaaggagaccatcatctccagcgagggctacaaggctgagctcgagaagctgaccaagcctgccgttgtcattgctgccgccaagaagaccgaggaggagacccccgctgtggctggtgaggctgcccaggaggagcccaaggaggagaagaaggagaaggccaccaagagccgctcccagtctcgcaagcgcgccagcatcttcggttcgctcctgcccaagaaggaggccgaggagaagaaggaggagactcccgctggtgaagagaccaaggccgccgagcctaccgctgagccctctgttgaggctcctgctcccgtcgttgccgagacctctgagactgctgctgccccaactgaggtcgctgagcctactgctgagacccctgctgagactaccgaatctgccaaggaggagaagaaggccgaggacaagaaggctgagaagaaggccaagcgtgcttccatcttcggtaacttcttccagaaggtcaccagcccttcccaggagaagtccgagaaggaggctaactccttccctaccgaggagactcccgtcgctagcactgctcctcagctcgagcaccccgtcgaggaggccgctgccacccccgaggccgaggcctcgactacccccgctgaggctgtggagacccctactattgaggctcccgccgccgagcctgtccccacccccaaggagaagcgccgcacttccttcttcggcaaccttggcatcaagaaggagaagaaggactcctccgacaacgagctcaccgatggtgaggccaaggagagcaagcccaagaagctcggcagtcttttccgcaagcccagcaaggctgtcaagcttgacaaggaggaggctactgccactgagactgaggccaaggctgacgccgctgaggaggcccctgccgtccctgccaaggagactgaaattcaggaggcccccaagcccgtcgagaccgctgaggactccaagaatgtcaacgttgccgtctccacccctgttcaggctgccgcgtgagatgcgactcggagtcctgtggagtttgaacggtggtgggacgtgtcctatccgccgcccgcccgcgatatacctgacgggctgattcagtcttgaaggtgcaactctgataccacttgctccaattgttttgcttttccctcgccactgtcgttatcttcggtccacggcccccgtttgtgtttgggcctggatctgagatgacgacaatgagatacccgctgtcgctttttttctttgattttctctaaaataataccatcggcgtcaacgacgcccccagactttggactgcggctcattcctttacgacctgcgtcccgcgattgtgactctgttcgcgacgcgactatgtgttacgtggtttgtcgtccgactagattgataccactctgccttttcttttttggttacttgcttttgtgtttgataccctgtggggaggatgggtgctctttttgcttgttgcttgagctttggatctagtctgtcgacttgtttctccctgcaacccaaattggccctgtaatgttgtctaccgttgttgtcccgaacggctggtttatattccgccgtataggtggcataccttgcgataggtaatacttaatagaatctctcaattttgctttacatcgtcatcgtattgtagttttgagcttggtcgttacgtggcgcaggcgataatccttgctgccaggctagtagttgtaatctctagcagcttatgcatatgatactgggaactccctcttagacatacttgtctcctacctcccatgtacctatttctcgatggtctcgtataaccgcaaagtgggtttgttcgttgtatttgctatgctaccccccttctattaatactgatgcggagacccagcactccctttccgcatcgtttaaaaaaaagtgtcatcgcaggctttatctttacgacatgcactgattcaatgccgaacctcttagagtgtatcatgtcgttcaatcccgggtaagacatcgtggccctaataatacagccacctgaatatcctcatccccgttcaaatgctcctcgggctcttcctctggggcatcacgttcggctaccgcgggctcgatgacaacacatggtctccaccaatccctgagtaaccaagatcatcccggtttcagtggaggcatcggcttccatgcgttccaagtggctgttcagagaacgttgagtgtggcagatgtcaacctgggattggggtcgtgttagttgggcagagtaactatagatatattcacgaatcggtcgtggatgaccttgccttccgcattgaaagcaccaagcattagatctaaactatccatagtcgtaggaatatccatttctacacctagaaaagacccacctgggaaaaagaaaaaatcgggtccataccgttgcatatgtatatgcaagcaatactcatagttgaggatctagcgacccatcgtgatgtcttggcagtctggggtgcagccttccatgttggtacttaaagaggttcattcaggaaaccaccattcgattattggatcaggcacggacgtactgtaatatatgcccgtgaatatccgtgagatcggcctctacacgagctcatatcgcggttacctacgtttaacatttgcaatatgatgcgatattgattgtagcaagatcgacagcagtctagacttgaaggtctactgttgactatgctagacaataatgacatgttcttttccagtgcatcgcacatgtctgcaaggtgcccggcgggctcctatttcggtaaagcctcgggccttggaggtacgtcggcattatcgcaggagaaacgaaaaatcaataaattgggtctgggttacgcagtgcaccgtattcgtattgactttaaagtatatcgatattctgttgagttattttttggaatcgagttttggacgagtatagaatgaagactggattagcatgctatagttatatctgagtactgcgtgtataatgttgtactgtactccgtctatatattctactccgtactccgagtctgcgacaatgaaattccggaaacaaatgttaaaagtcaatttcacgcccttcggcaagactaaggaaacgtgagcctctcataggacattggcgacggactcagcccaccggaacgagattgggaaaggatcggtggatccggtgcatttttctcattgccctcatggagaacgcctgtgtctccccgggtctacgtgcaacctcatacccaggtaccaaggaggaattgtgcggtgcctggatggaattgatttccaaagaagctcagaagcttggttgtgtgggttttgagagattttgggtgcaagaaaccaattgaggaaaaagcaagttaaattaaaaaagaaaatgcatgccttggaattccgggagggataggaatatgagcgctgattggtcaattcgaaaggaagcggagaggatcctggggacaggtacttggaagatacctgatttatgtatgcagatgcaggccaagtgcaggtaccatctgatgtactgcagtctcgatggatgcctgtccgatgtaaccaatcacacccacgcatgcaggctgtgactcacaccccgtgacttccaggactaagccccgtgcggctccggagcaccgattggtcagcaccagggcacacagcccttaagaagtgcctgagttccccctccccgtttgcctgatttttctctccctatacccgtctcttttttacacacatacacataaaccgccaaattgctgccacaccagaactatttacaacttcaccatcgccaaaatgggttcccaataagttccccgtctttcaccagccagtctatctcaactgaggcagacattatttctccatccggaaaccgccctttcatctcctctctacccccttcagagcctccttttggatctctgaactttagcatcgcgtcgcgtagctccagttctcccaacaaatttaccccgatcgacttaacgtcgttcaccacggattaccaccagcaaccatggcttccatcacccccacctccacagcccttggcttccaatcagaacaacaacaacagcaacaacaacagtgcactcgaggactttgtgctttatccatcagccacaccacacccgcagccccgcttgcgtgtgcctgtgaacacaacccatagaccttctgcactccagccattcttggcgcagaataacccccgacgacactctttcagtctgcagttgcaccgacatctccagcagcagttctctggttcacctgtcccagaccccagagtgacccagcttgcccggtccccctcttattggtcccgtcctacgttcacgcaccaccgttctaatacggcttctgtgccttccgattctccaaacaccaaccgcccacccatcccgctttttaacggtcaaaaccaaaacacgccaacatatcgacgtgtcatgtccacccctaacttcatggaaggtaattcattcatgtcgccctgtgatagcgagtatatcgctaactttatgaaagctaacgaggttgacctgtttggtctcccctcgggcgacttcgccgctggcatggattcagctctttcattcaacgatctcggcctggccaacttctcccctgaaggtcccccgggcactatctcgccgagggatctcatgatggatgcgtctgttcctccctccggtactttcaccgacctgagcactccctcgttcgagtcgcccggcaacttcagccaaaacacctcgcccatgttcaccgacatggatatcgctggccacgaagaatggccctctcttttcgaccactcgtcagacccactcaatgccttcgaccttgctaccttggatgtcgcagctgccttcactgaaccgaagaagccagccacgacgacaatctccatgtctcctgtctccccccgcgccaagcgatcggccgcatcctcgcctgttcccgcctccggtacagccaagcactccagcgtcgcaggtgtcaatgcgcgatcgcgtaagaacctgtcgcctgttgagttcgaccccaatgatcctattgctgctaagcgcgctcgtaacaccgaagcggcccgcaagtcgcgtgccaagaagatggagcgccagttcagctccgagcgccgcatcgaggatctccagaagatcatcgccgaacgcgacgcggagattgccaagcttaaggctcagctccagattcaaaatgcctaccagtaatggtgctcctttttctattcttggtcattcaaaatttgagacacgggtctttgcattatggccccctcggtgattctgacgattgtaacgattggacatttcgtcttcatgtttttgtttcgtttcgaccctctgggtattgtggtaggcgcgggtgatgggtaaagcctagccccgacgtctcaccgagatcagatgaacgcgatttgcttcgtcgcctctgattctctaaaagtttgagacaagttcctcagtcaatgtttctttttattttttccttctgatctgtgtttctcacttttgcgctctgctgcttcagcttacctacttcggtttttgattacttttgttaggccggttctgattgtctccctcttatgggattgactcgtggctctcttaatatgttatttgtctgtgtttgaatcaatcatcttgctctatctcttctacgtgtattgtaaactatcctagtagactaccccttccttctaaagactatttgtaactccctggtaccatatccttccctcatagatatacgaccgaacgataatctatctgcatctccctcaagtgaaagtgaaagtaatctagtccagctcagacttgcctttaaaatgcctcataaacacacccgatcccccaaccaccctccatctcataccacccgcactcacaacccttctcccatctccccctccctgtaccaaaaccctaaacagcactcctttcctccgcatctcgcccgcttccattcaacacgagcaacgcaccgtccggggactgctattgctctatgcgtgaacgaaagagggtgggagacacaggagatggggcgtttgaggttctggtgtgcagatgcgggtatttgagatgggtggatgggtgtgtctgtggatgtagtgtatggaaacgaaggacggttgttgggtgaggtaggtttcggaagtatctgattccatgttctgtcatcatagctggtggagggggtagggatagagatagagaaaaagatggagatggagatagagtagaggggggaaatgaaaggaagaaaagaaggatatctataatggaggatagaaagaaagagtaggtagatggatgatggatgtgtaggaagaagaagaagtggatacgcatgcgtaaagcacctcagaacgaaacaaacaagcagcagaaatccatccgccacaagtctccctcagctcaaagcatccgtacccctcgacctccccgtctccatcttcgccgtccgcgcgccaaactgaatagccctcttcttctcacgagaaaccttcaccaagcccagccgcagagcaaccagacgcagcgccagcttctcggcatcaataccagccgtagcctcgatttccgggagtccgaacccgcacttctcccacacaggagcccgcagcgtccaagccacgaactcttcgtctaggaatgggaagcgcgtttcgcggccccagtgcgagaggacgcggtcgtcgcggccgagattgcgcgacccgagtcgactgacgtcaagctcgatctcggcgattaggtctttgaagccgccgcggttgaaggccacgctgtgtcggccgtagccggcgaagagctcgtcggcgcctaggccggagaggaggacgcgnnnnnnnnnnnnnnnnnnnnnnnnnnnnnnnnnnnnnnnnnnnnnnnnnnnnnnnnnnnnnnnnnnnnnnnnnnnnnnnnnnnnnnnnnnnnnnnnnnnnnnnnnnnnnnnnnnnnnnnnnnnnnnnnnnnnnnnnnnnnnnnnnnnnnnnnnnnnnnnnnnnnnnnnnnnnnnnnnnnnnnnnnnnnnnnnnnnnnnnnnnnnnnnnnnnnnnnnnnnnnnnnnnnnnnnnnnnnnnnnnnnnnnnnnnnnnnnnnnnnnnnnnnnnnnnnnnnnnnnnnnnnnnnnnnnnnnnnnnnnnnnnnnnnnnnnnnnnnnnnnnnnnnnnnnnnnnnnnnnnnnnnnnnnnnnnnnnnnnnnnnnnnnnnnnnnnnnnnnnnnnnnnnnnnnnnnnnnnnnnnnnnnnnnnnnnnnnnnnnnnnnnnnnnnnnnnnnnnnnnnnnnnnnnnnnnnnnnnnnnnnnnnnnnnnnnnnnnnnnnnnnnnnnnnnnnnnnnnnnnnnnnnnnnnnnnnnnnnnnnnnnnnnnnnnnnnnnnnnnnnnnnnnnnnnnnnnnnnnnnnnnnnnnnnnnnnnnnnnnnnnnnnnnnnnnnnnnnnnnnnnnnnnnnnnnnnnnnnnnnnnnnnnnnnnnnnnnnnnnnnnnnnnnnnnnnttgagctgaggggtttgtttgggctgtgccttggccgcgggatgcgaagtacagggcgcatgcgatggacatgtccatttctgtgttgtggggtctcattaggcgcttgacttgctcccggtgtgcgagagtttctgtgtaggggatgtcgatggcgatgaagcgccatgtgcggcctggacaggttgcttggagctcgatgtgggcggaccggccggttatccggtctgggcagttttcatatattgagaggggcggggaggagggggatttttgttggttggcttttgcggcggctgccactcgcgggttttcgaatgctacattgaggaggtcgattggttcttcgagggggagaatgtcgtgagagagtctggcgagaagtgtgcagtctaaaccaccggagaagagaacggcggttttggccgtctggcctacaatgtagcctggaggctcggggatgttctgtattcttaattcgagggattgaagcagttttgactcgagttcctggacgaatactgagtctgttgtcaatgcaggaggctgctctgttggtaaggatgtattcataggtgggattgattttctcttggtctcttgtcagttgctgctcgcgggaagatatggtagacatacaatgtgaccagctggaagtgaagcagcagagctccatggcaaggtctcgattttgcacaactctctggcagataaagaaggatcttgatagcgagctaggtcaatcgtacaaacgccctcggtgcccacttccttgaagcaatccagcgatgcgctatcacaaatgctgcaaatcttcaaatttccattttcatcaaatccctcgaggagcgatcgcctcccaagacaatccctgctgtagaagagccttgagttgaccgcatcatagaagacaaaggcaaatggcccagagagacttgcaatggcttcagccattctctcaacaggatcattctgatcacccttcactgcctgtagaaataagttgaaaacgcgttcggtatcattgccttggacgcgctccccagcgatcttccaggcttctccgttccagcagagcacagactgggttgtggggtctacaagtggttgtgtgtacacatggtcacctctcaatgagagcactgtggatgtgaaggtgagataataggaaaggggcggagacactccatcctgtgcgttgatatctttttgcgccgtatgagttttgtaactgtctggtcctcgcttttggagcagagtgcaggtctcctgtgtcggtggtgtcgactttgacgagctcaatgaaaagaaaatcccacacatggcggagggacaggtgggagtgttgtttattctgagatggtcagcttgggctttttttggatatagaggtgcctgaggcattaaggcattagtcattatatccacccgccttgtcaccagcggatgcacttacgacggattggaagatgttgaactcgtagatggtttattactagatggtgtcttctaagaatgagttcgactctgaaatccgtgaaaggagatgggcatcatgcaagtacctatcttcgaaggtctggattacacaggctgagcaatgttagaactacatataggtatggagtagtaaatacatctcttgccgagtgagaaatccataatgatactgtgaagtcagcctccttaagataacccaaccatctgggcactcattcctctatacattattaatagacaccgcctgaatcgagaggcggactacctcggttgaatgatgatccgtacatcaatatgaggagccgcatgagcatacttggagtcttcatgaccccctgaatctattttttttgcccgggcgcatatgactaacatagcttatgtcggccacagaatccccgtcctctccgggtcccgatacgagagacgtcccccatatccatgaacacaccgaaacgccggccgctccaaccgaccgcctagctcaaacacaggacggtctcgtcagaccagacagcagtcaaatagtccaaatgagcgcgcaggaaacaacagaggcacaccccgcggctactccctccgatcccgccgcgatggacttgacgactgcccaaccaccacaggctgaggctgagcaacttgcggggcagctggaaggactgtcggtctccggagatgcgactccaaatctgtcatccagcgcaaatactcctccgccccctccgccccagaaagatgatgtctacctcaacctgacaagttctacgaccactgcgccaacgctgccatctatcgatccaaaccacacccccggccccgaaaaagagctcccagatgtgcctagtgacagtgacccggaatttaaacgagctggtcaggctgaaggacctcgggacgataatgcctcccagccagagattcaaagtatcatgggacaattccaggaccccgcgcagagcaccgaccaaaatgtgatcatgtcaccacggcttgagcttgctgagcaactgcgaagcggtccaacatatttcccgccacgtcaatccagtttggaccatgcggcttccaccgagtccgtgaccgctccggtcgctaccccggagaagcagcctgtatcccaacgtccgcagatgcccgaatcgccggtaccaaatcggagagcgtccacctcgacgatcctaccgctgccggaaccagagcctgaccaaccattcgattttcaccgcttcctagaacagctgcgacaccgcaccgccgaccccgtagccaagtttctgcggtcattccttatggagtttggcaagaagcaatggatggttcacgagcaagtcaagatcatcagcgatttcttgacgtttatcacaaataagatggccatgtgcgagatctggcgagatgtttcggatagcgagttcgacaatgccaaggaaggcatggagaaacttgttatgaatcgtctgtattcgcagactttcgccccagccattccatctccaccgacgatacccagaagcgcaagtcggacccgacggagagagctagagaggctccatgggccgtggcgacgtggccagcatcaggaggacgttgagcgagacgatatcctggctcagaagatacgcatttacagctgggtcaacgaaacacatctggacatcccgactgtgagcggtggtggacgccgtttcttgaatctggcacagcaaggtatgtactatgttctggagattttccaacttgacttttctgactttgcttgacagaaatatcaaaaatcaatggctaccgggctcctcgagacaaggtcatttgcattttaaactgctgcaaagtcatatttggtttattaaagaattccaaaaaggccgacacatctgccgactctttcatccccctcctgatctatgtggttttgcatgcaaaccctgatcatcttgtttctaacatccaatacattcttcgattccgcaaccaggataaactgggcggagaagcaggttattacatttcatcgttggtatgtttgacttccatactgccatagatatccaaactaacctctcctagtctggagccatccagttcatcgagactctcgaccgcacaagtttaacagtcagcgacgaggaattcgaacgcaacgtcgaagccgccgtgtccgctatcgcagaacaaaaccgggaatcagaaaccttcgaagagaagactcccactcaaccccctccatctcaaccccaggctggaccaagccgcaaagaaactactcaatccagtgacgaagacaccgccccagtcgcaggactactacgcactatccaaaaccccctcaccaccatcggccgcatcttctccgacgacggagattcaggctccgctcctcaagaacgtcctcagcctgtcccgacaccccaaccaggtgtcgctcctccccgtctcactccgaatgtctaccagccaccccgcgcaagcagcgaggaccgccgctcaggtgatgagcgcgcccgcggtagcggaacctctgcgaagaagaatctaagccgtgtgctcgacgctcaggatgctgccgcacgccaggctagtgctgaagatgcggaggcgcgtcgcatccaacgcgctgaacataataatgttgtcgagacactctcgaacatgtttcccaacctagatcatgatcttattgacgacgtcgttaagatgaaagagggaaggtgagtacttgaaaaggtttatactattggatctttactaactgttcctcgcagggttggtctagctgttgatgcttgtcttgctctaagcgcagagtagtatatagaataatgtagcatcttcgcctgttcggggataacatgtcaggaacagtctcaggggcaattctgtctctctcatctttgacttgaaataaatagccccagaggtgtatctttcttaaaaatataatatcgcctccttcgcccggcagaggtacatccaccaaccggaactatcaattattgcagctgctagactgaagtatctatttaattgaaataatatatttatatgcatctgtgtataagctgttaaaaagggatggtcatcggcagttgaacagggatgaatgcctcaaaccccagagatcctcggctcttccccgcaaaaccgcggtctctcgggattttagtgtaactcattctccttcaaagagtaacatattacaataattccgatttggaataaatacagtctcttcttctccctagaggcaacattgcacaccatgtcgtcccccttccgcatcattgagcatgtcgtgcccactcagcacattagggagtatcctggcgccacggccaacgaccaagaagagcccctatatctggccgtgaaacaatatattccactcgacaatcccaatccacaaccaggcgacattaccattcttggtgcccacgcgaatggcttccccaaggtatgagatacaagtgccgaggtccagacccgctttgggctgcgcgcatagcgatggccctggacgcatacaacctagaatcggcgatatactgatcatttctcgcaggaactatatgaaccgctttgggaggaaatctacgctcggtctaagcagaatgggatgcgcattcgcggtatctggatggccgacgtggcgcaagaaggccagagcagcgtgatcaatgaagactccctcggaaatgaccgtatgtgtatgagtatcttatgagaagcaattgatactaactatataacagctagttggtttgaccacccccgagacctcctccacttaatcaacgtcaagcgggctgaaatgccccggcctatcgttggcatagggcatagcatgggaggcgcccatctgtaagttccaccaaccatcacattcacacagcagctagctaacctactcctagagcacaactgtgcctaatgcacccccgactcatccacacactagtcctcctagacccagtgatccagcgccaaaccacgcaactagacaatctcagcctgcaaatcaacaagcgcgtgatcgccaaaactacccaactatcaacccaccggcgcgatctctggccctcccgccaagcagccgcagaaagcttccgccgcagccccttctaccaaacctgggacccacgagtgctatcccgctggatcgagtacggcctgcgcgacctcccaacagccatccacccactagaccccaagaccccgataaacaaaaccaccgggcccccagtaacactccgaactacactacaccaggaagtcttcaccttctcgcggccaaactacacgaacatccctaacagcaccaagcccgtcaaccgcgtcacacacccagacctagacgcaacccatgcacacagctaccccttctaccgaccagagccagcccgaatcttcgctcagattcctttcctgcgtcctagcgtgttgtacatcttcgccggcaagtcggacatgtgcgggcccgatatgcgcgccgataagctcgctaacaccggtaccggactgggaggcagtggcggcgtggctgcgggccgtgtgagtgaagtcttcctcgaggattttggtcatctccttgcccaggaggctgtgaatgagtgcgctgatgcggcggtttgttggcttgcgccggagatccgtcgctggcgggcggaagaggagagtttccgcgcggcttggagtcggaagtctaagattgagaaggttactgttgatgcggagtggttggagaatgttcctgcgccagcgcgtaggccgaaggcggtacagaatggggagtcgaagctataggtgaatgatttgttcgtagaagtataaaccatatatagtttgcttttagattattctacatctgaatatagaacggtcaaggctcgtctgagtgtttttctatttctttcaggccctatgaatgagttcgccgaatcaacgactataatagttcacaagcccgaccccgttctatagcaacgaccccgtgcgcccccaattaaaaaacaagagcaaaaggtatctctatggtccaagccaaaagatccgtctccgggacgaatggtgttcgcgaaagcaacgccaagaagattataaagaaaacagtgctctgctccgagtctcgcggcaaaggacagacaggagcgtggtatctattttatgtcgagggtcacatttgcaagagtgtggtatatcgccacccataaaaattgggtgcgagtaatgaaccaactgggagagagaatgtctcggcagctgtttcacgttgacttcttggctcgggctaccgcggattcggatggcacatccgaggtgcggaccacttcgggaatctgccagaagtgcacccagcgcaggtggtatttgtcttgttcgttgttgaggcagtggcggagccagattccccacgtgatatagagataagcaccgatgccagtcatgatatgcctgcaagtgagaatgaattagcaaacagaccatagcaattcatagtaggttgagcacataccaccaaccatgtccttccaataggagaccccatggaagaccaacagagcggcgataccgacggatctcagagcagtatatgttgtccaagccccagatgaagaaaccgcccaaaaacatgctcagtccatatatcaccatgaaccacatggtcttgagggtcttcatgtcgcgcacattctcgtagttctggcgctccttcgtcggaacgggaagtcccatcctctggcgtgctaggcggtcctcttccgtcgagtggcgccatctgggtcggagggttgtttccatagtgtgcatgctgcggaagacgacgacggtagtcaggcacgcgtatgcattctggtggaagactgggtcttggagatagtggtagtacagggtgatgaatacagcgagacctgtgagcgtaattccgagaaagactcgtacggtgttggtccgggagtacgagaatgaggcatatgccataaggcaagtggtatagatcatcgagagttcgtccactagctgcatagggtctgttgtggggttcaccggtcagtattgctcttgcgatcactcatatcgtttaagacatctttggtgggggcccgccgcccttgaccacatcttggggttagtgtgtaggaaacttacacttgagggtcgagtgaaacagaaagcttcctgtgccgactactaggtagccaacgagggcgaccgtgaagatttggtcatgtccattacgacggcagctgcgaatgccctggactccaagccacatgaacagcaaattcgtgagtgtattgacaatctccgcggcatagggggtagcataatagtcctgcgcaaagacatatatcagcctagttcttgcctctgcgcttcctcatggttggaaatacacacctcttcgcaccagttcaaggtggaagtgacaggctcccagtatccggcctttgcggtcggatacggaaagaagggcaaagaccaaggcatttatgctgtataccaaggtagtatagatgtcgactctgtaaggtctgtaaggtctgtaagccctataatgtcctcgaaattcaaagagaagggaaaagagaaaagaacaacaaaaagcacatgacgtcgataacccacgggctcgttggtccgtgcacactccgcgagatgccggatgcagtcgatttcttcactcgagggctatttattgacatatttgtaattaaatttcgatatttacttcgatatcgacttctctatttgtgtttgtatgtttctgcttgcgtttggggctgtaaaacagtatgcatatgcgttggaatgatctacatgaagtactccgtactccgaacatacaacagccttacggtcaaagagccgcatgtgggatagtatagcagtcataccatagtcatactatgtagttgactttagagtgccctgagctacttgaactataactattcattgcataatactaatcttctactccgaatattgtacaatgtataaaatcaacataaaatgccaagcggtgtggcttatcgatagccattgctgaccccgatgacttcactgtttttcaacgtctgtcggcgacctcggcaagactcagcacttgcatttgctctcgatcttgttcaattctatttcccctcgttgaatccctggtggaatgcaagccagtgcccacatttgactgagaccgtctttgtggacctctcttgttttttttttccgcatccggtggatacgcctgcctgaccgctacgcatacgcgacatccatggagctcgatctggcattgaatcctctacctttaaaataaatatattctctgtcgccgaagtcgcggcccgggttgacccagcaatgtcgcaaaataacaccctaacggtgccacaggtgaaaaccaacacctcaacaagtatgtttctgtccaagctccaatcatttccatttcattgctaatcataatctgcttactgctatagcctcaaaaacaccctttcactttgctgctggtctttgctctggccttacctcctccatcctcctccaacccgccgacctcctcaaaacccgagtccaacagtcccagggagccgccctcctcccgactttgaaggctattatatcctctccgcatccaattcgcggattatggcggggtacacttccttcagccctccgcaccggcttcgggtcggcaatatacttcaccagtctcaacgcattacgccaagccgttgcgcaaaccaaccccaaagccttgaccaatccggtaacaagcgctaggtcatcatctgtcctcccaaaactctccaacacagccaatctcaccacgggagccgtcgcaagagtcgccgcaggcttcgtaatgatgcccgtgaccgtgatcaaggtccgttacgagtcggactactacgcatatcgcagcctaatgggcgcaggccgggatattgtccgcacggaaggcctgcgtgggctcttcgcaggattcggcgccactgccgctcgcgatgccccatatgcgggtctttatgttctcttctacgaacaattaaagcgacggttcgccctgatggccgcgaaaccctctaataatggcgaggcacccactgctgtttcgtcctcgtcaatacacttcgtctctggtggagcggccgccggcatggcgactgcaatcaccaatccttttgatgccgtcaagacccggttgcagctgatgcctgctaaatatgggaacatggtgcatgctacgcgcttgatgatccacgaggatggcatgcgcagtctctttggtggacttggtatccgcatggctcgcaaggctattagctccgcgctggcatggactgtctatgaggaactcatcctgcgcgctgagagacggtgggaaacgaatccccagatgggtctttaggcttgtgttttctgcctttcctgcccctggctatctccctccctcacatcatacccattccactttctgtattatagtctgttaagaccccattctagctcgcgtctgggtccgtgcttagagatgcatatctgcattgagattgacccaatgtgaggttttcttacacaaagctgaggcctgacatgtatattgtactgcatctgcatatactgcttatcatatcatccccgaccccaactttccatttatactaggggtatgccccaacctagctataccaagcctatgcccgtgagatgttcactacatgcgtagattagacagggtatacaaagtaaccggtacgacgagagaagatagaatcagaataaaaacatagtcatcagttcatatcgcgttactatactaccacatgctctgtgatataaaaagaaacacccaaaaaaaacaaacaaatcttaacaaaacacaacttggcacaatctcaacaagaaaccaataacaacgtttacatataccggaatccaaatttcttgtcacacatcaatcataggcaaaacagcgctgaataggaaaccatttatgcgaagacgcgcacgcggcccgaagggctcttcttccggaccaggaacatcttgtcctttcggcggtcgttgactttcagttcggtcatcgagtgggatgtctcggtgagcatcttggtctcgcgtaaacgtcgagtgtgggcgaagagctgttcttggaaatcgtcgtcgatccacttcttgatgatgatgtagttgttgtcatgctgtgaacgtgttagtctgcattgcacacacacggggggtatggttcttacctcatcccaatcccaaggcaggccgtaggctatcaaggtctctggcatcaagtgcttgcgatggacctgggatagtgttagttgaagccctagtatatagagggatgtatagagtactccataccttgatccatgtgatcttctcttccttcctctcgtcccttcgctcttccctcctctcttccctcctatcttcttccttctctttcttttcttcttttttcttctcgtcgtgttttttcttattgatgatgccgtcgatctcctcctcgctatagccaatgctgcggaggtgctcgcggaactccctcgccttctgcatggcctcctcagcctccctctgcttcctccgctcctgttcaagcttccactcttcaacagcagcagccttgacagcgagctccttcttcctcttctcctcggcttcccttgcctttcgcatatcctcatctcggatctgctgaatgagcttttcgcgctcctcctcttcttccttctcccgggcaagccgtttccacttctcctctcgcacaagcttgtcccgcgcctcttgctcctccgtcaaccttgcaagctccttccacttttcctcccgcacgagcttctccctctgtattttctcatcctgagcgcacgcaatttccttcaaccgctcctccatcagtttgcgtctaacctcctcttgctcagcagcggctctcttctccgccgccagctgcttgagctggtagcgctccccagccttgcgctcctcctcctcggatagatgcttacgctcgaagtgctgcagcttacgcagccgatccgagatctcttcctcgtactctagctcctccctgagcatgcgagagtcgtgcggatcgggctggttcacaatgatttgctcgcgcgaacgtgaatgctcatgtgaacgctcctgctcggcgcgccgagacttttgcagctcccgctggagccgttcgatctcctgctgatgcttccagagatccatgtcctggcggaggtcattgcgctccagcaattgttggcctatgtcttgccggatgtcgttgcgctccatcatgtgttggttcatagctagctcgtgatcacgttggaggggagaggctgtgcgcgagacgttgctgacggcgcgctcacggcggcgcggggcgacaggcacctgcacgatgtcttcctcctcttcatcctcgaagcggttgacgttgtacttatcgctgaaccgctgctgcactcgtcgagactggggcttgttctccgaccggctctctgatttcaacccttgctcgttgaaaatcattaccgccggtgcggtgggtgccactggtagttcatactcgcggtgtcggctactgatcgaggccgaccggggtacacgggtttggataggtggtgttatgtactcgcgtgtgatgatttccgggcggcgctggcgagaaacagagcgctcgcggatatgggttctgacacctgttcgccgggtggagacgtcggtctcaaactccgagtcgtgagaagaatactcgtcgtcatacattgctcgtacgggcatttttggctgggttgcgaccagtcgggtattgataatatagattccctgatagaggggcgctgggcggggttatcacagaagatacgagagataccccaagagaaagcgagagaaatgagaagtaagctgaagaataaaaactggctgaaatactcgaaatttgtgtacgagaggtgtgcgcttagatcttcagccaaagcgggggaggggttggggagaaagagaaaaggaaaaaggaggaaagccagggagtgcccttttattttgttcaggcgtcatgggcgtcatttttaattcacactgtatttcagcctcatgcataatctttggattcgactcgagaatcttttccttcgacagactccaccctctttcttatattcccttctatccttcatatactatttccagattccctcactgttgtactcggtacattgtccacactgtctactcccactccagcgttgggataccatcatcaccaaggccccacttcgagtccattctcgaggattgatgttagcgccgttgacaccgaggcactctaatattagttcttttagaccgcacattaggcagtgtcgcgacacagacccgcgacacatgaaaccacattctttgtatacggaactcaaaccagacccttcgcactaactttgaatgagccgttgagcacgcatccaggagacatcaggcggttactgaaaccgtgtttgttgtgatctcgttttcctgtggatcaccgagtcgcgtcttgaacccgtacggagcacttaaactgggtcccctttagcgctgagtcttccgacctaatatgttgtatccataatcgggacttcgagataccattcgctgcaacactgcattgggcaccaacaatgtctcatgtcttctccatcccaggctccatccacggttgatctatatccattttaacacacagtagctcgccgggtggggctttgcacccatggatattagtcgccgcttttacgggggcgaaggattgcgcccacttggactgagtgattcggcgaaaagcggcgggaaaacagccggaaatggaaatttcatggctgggaacgtgatgctatccatggaacgcagcggtgaacctgtggacgaggtcgggtgctcccgtgacgtgacccatggactgctgactcccgcacccgactggcttctcttggttcttcgtcacgtctataaacactaacatttgactacatttcaaatttctagtccttgaagaccagaatctatggaagttgtacacggccgtgtcggtgcgagtctccaataccccactacatcagtcttctgactgtacggagtaattcaaagcgactactccgtaagtggaatatcactagttatattcccaccacatgattggatgaaagaggggggcagtcacgtatatccatctttctgacaccctaggctaaagctatggagctggacaacgcatagctgcaaataatatcacaatcctttctagttgccactggcccaagggttggcacggcatttctatccaacgcaaaagacacaatatcagaaccatgggaagccagagattgatataactacacactccacttaagcattgctatcaaacttaatgttgagacacctaacccggaaatcctctgaggcctgatcctcgtactccagaatcatcaatttcaaatccgaagctagtaccaatgtgatcgaggcctgttgctagattgatccacttgcagattccaaagatggagcagacaaggcctgcttggctgtcgtacgattacgattcaaaccgatatacccatacccatagtctcgcccattctattctcgaatctattaattcactgcgtaaagcggattccgttcggcatctccgagatgaactcatgttgccatgagggagggacaggataaaggtcagagctcatatggactagtacgtgcccgactaatacaacatagtaccacagaccaacgccattggcgtcatctctgtagccaggcccattttacccggacaatgacgtagatattggcagcataggcgctcattcctggaatgagaactgataagacatgattcatgtgacaataccaaatggaaatgttttttgtggactttgcgctactgaccttttctaccttggatccttgaggaccttgttgaagtatactttcgatcagacccctttgcatatcagccctatcaaattgccattttggtgagacactatgcagatattaggcacctaccttgtacgcaccttatcgcgtgtcgtgtaatactagacagcctgaaagaagtaaatttaaacgtgcttcgcatttgacccttgcatcgtcggaaatggcagctgcagcactatgagctactaccccacaatgcgcttgacagctagcacaatgaacatattaaattgggatgttggcaccgaggctacgtatttctcgttagacgaagatcaatcaactcttaaatccaggattaggattagataagaatccacagaaggggaggatacctgtgtaagcaaagagattataatggtacgctctttcctcgcttgattcattcaagaaagacatttttgcaaacaaaactccgggtatctaagtcaccagccggcaatccaagtatgtatagtcgccagaacgtgaccaggagccggacatagaagggcagatattggaccttccgtgcatctccccggcatagtgtatcatatccaccaacccatcgcaggtccgcccggaagaaaatgacagagcagaatcagccttgtccgttcctgcccattaagattcacattcgcgagaatcgctaaacctttggtataaagataccacaatcaaggatacccgccacatgggagcgcatcgcgttcgcgtctcgctctcgtctcatattcttattccaacaatctactcacgccctcccagacttgagaatctgctccaagttctcacgactcttctggttcgtcgtctcgtgatattgcagcttcttctcgaggttggagatctcagcggtggcctcgccactctcgcgcacaagacgcttgttgactatgccgacgggaacgttgacgaacctagaacagggcgataagtcagtttcatttcacgagaaaaggggccaatgagtgatctcgccgactgtctcacagtttcggggttgcgaaattgaaaacaggaaaagaaatgtgataagaaacaaaaagccaggataggaaagagaaaacaaaagctcacattttcccgacaccctcgtaaacattcgtatcagaaggcaactcagacaactccttcgatgtaagctgtagcatgcggatatcgcgctgcttggccgtcatatgagccttggtgatactgatctgctgctgcgaggagatcgcacgggtctcaatctcctggaagagctgtagttgtttagagccattagcatttgcttgtctttattggaattgacgtcctcaaccggaaacagagacaagaggctgagtgagaccgaattggcttagcacaccgcttcccatgaccacctgctcgcggtatccgacccaaatatgtaaaatgattaagtctaagacacaccttctggagagcttcgttgggaatcgacatcttggctgtggattgtcttcggagcttggatgcggttgaggggtaggaggtaggaggggtgcggaggacgggcggaggtgaatttgttttgttgtggactccggattagaggtttgattttctcgctggaggaaatgggtatcgatcgattgatttttattgaactgtttcgcacgggtgtctctgtcaaatgtcttggtcaacaggatcaattcgacttgctcggcgaagccttggggttgaggcggtgggcaagcggggcggtggagtattgcctgacttagggctcgaggtatacgagaggtgtgtcaggtctcagagagagcatggagtttgtgttgggcaaggcagattgatgtgtttatctattttatgtgcctctttggttgaaaggatctaactggattagatcaaggttgacttcagacattcacactttatgaactgtctaggaagcgcaggcgcaatacacttagagctccttgagttaaaaagagaaaaatgggacagaggtctttggtattcaaaccaatttattagaaagaaggacctatatgttctgtctagcaggaacgacatattcatacaagaattgtatgcaccaagctcatgacagtattttggacttgaatagcttcattcgaagtggctagtcccattccaaatctcataaataagaaatctagcagttttgcttcaaggggctaaacaagtttgcaaaacctggcgagctcataaagacatggaaatcactaggaccattgcccatcgggaccttccagcatatggcaaccgcacgtgaatctctcaagtagcggtgtaatagagtacgatagaacgagacatcataatattccctgcaagccatgagatccaagatctgtagggacatcactgccctttacagcatgtgaagatccgcgtaggctaactaatctaagaccggtgacaatctaaagcctttacctaatgtctactggtttcaagatacggagtagagagagatttgaatggatatttgctaaaaaaaaccaatgggcattaaaaaaaatcacgattcctcccagtgcataattccttcgacgtgaaaatatcagaaatctaaagaccagaccctaagtatcgaatcgatttccagccagatccgaaatcaaatgaaagtaagacaaagtccagattgatgggcatgacagtatgaaaagtaaaagaccgaaccaaggagattattcatgattcccgtacgcccagactccgtctcccattggcgtggccgactctgctcatgttctcatccaggagtacagcagtaagttggtcagccaattaatagcgtgggagactatgaaaggcccgatagccatgggcattgcttgagtgcttagtagttgttagagttgggctcagtggagcaccacatctcgaactcagagctggtggggtcagccatgctttcatggcgagccatatcccatgatggatctcggccttcgaggctctgcatactggggaggtaggcagaggtcatgctggaatgcgcgtatgaaacggcgccggaagacatggccggcgccgatgaggctgtgtaatagccggttggagtctcgtcagcccaggtgtatgagccagggttggcataggaaggagcggacatggcggaaactccagactcgccgttgctgagaagacgggggtccatgtcgtgcatggggagaccgtgcgagtgagtaagctgaggctggagcaactcatggtgagtggcaccagggagaccggcgagggaagagccatatcccatatcctgttgagggctgttggagcggtagtgcatgtctccgtaggattcggtgggctgcatcattgggaggccactgggatggcttgtgttttgccaggaagggtgaatatatccgggtgtcatcataaagtcaggcccaaatggtgaggaatcccggctactatcgtagtaggcctcttcgaagctttgggatcgtgagtgggcgtaaggagacccgcgatacgtcgtcgatccaaggtcactttccatgtcagagaaaccgccttcatcggcgacatgccctggtgtgagggcaggagagccactatcacgtcggctggcagtggctgcggctttgttgggggagaacttgtagttaggatgtgttgcggcatggttgtcacgttctagcttcgctagatcttcgtatttccgtcggatctcaaccggctctagcttccagccctggccagcgatcttggagacgatctggtggttgttcgcacccactagtcgcttggtgcgctcggcatatgcagaccgataaagcatgaaggaattcatgggtcgagagatcttcccgttcttcttgcggacctcgtcctgtcgctcagaggccgatcgagagacccaggcgtccatgtctttgataggagtagtgtgaaaagattcagtaagctgactgatgggtccctcaagctggatacctgaatcggagagttctctccggttacggttgcgccgctgtcgggctgccctgactggagcgtctctgactggtgttttagcacgagaactgggggaccgtgaccaagctggcgaagaggtcctggtaggtgaccccattgggatgagatcttcatcagataccggaggaggcgtggtgacctggccagacatgatctatcttggtcagtgtcggtcaatggagaaatgggagtaaaacttaccgattgaggaggcatgtgaggataaccggggacggtgtagaacggaggagacccgtagtgctgagatggttagcattgctatgaggcaacagccagaagatcagacttactatttcttggccactgatttcaccagacatctgcatgttgatgcacactgctcggtacgttccaggaccttggaaggactcttcgggcaagggatgtccgtctgtagattggggaggtgtaggaggaatgggtcttgcaaccaaagtcattgttgtgatgctgatgagataggataaaaagaggatatgagttgaaagctagggaggaaagaagagaaagagggtttccagaaagaggaaagaagtggaagaggtgtagaatcaagatattctctgctgtcctacgcagacgggtttgtctcgcagttacgctctcctgaaagagaggtctcaaacacgactgcagatgcacccgctggcagttgagacacgcactgcaacaatccaattggatgtgtggatgtaggtaagtatgaagaccctaggtatggagatcaagtggatatgttcaaagaggaaagacaaaagccaaagacttggatattgccgattgaaagatgggcgggtctcgcaataaatagaggagaggggagagcaggcaagtagccagagaggctgaaacctccagaagaaggcctggaatacaatccgcactctagttctggatgtgattctgagattatttggattaaatcgaaatagaaatgcaatttaatattctcattaatggaattaatcgcattttccagatttatttaattggatttcgcttttctttatttgatttcctttcctttcccttttctactctaaatccagtggaggcgttcatggcagattatttaccactttggtcctagtccgtgctattggcgtgataggctgcatttgcaatattccattcaatgctgaaatagcatggagatggatctgtgactgccctatatctcaaacatattgtctttgtgccaaatttggacacctacaaatagcctggagagaaagaaaaagcttcggctgggtgacgatgtacggctccagtatggagccattgcactagggcagaccatgggcctgtagggtctttccaccgcccgagacccggggatgcaataggcccgattaaaatggaaaaggagacatccggagccggggtaggtggaaatgtaaatgtagtgtgatcttagcttggatgcagggtcgttgggatatttcttttttcttatttttattcttttatacttgacactgacactgacactgacattcgaaaaagcaaccacggggaagcgtatagttagcagatgcaagtaaccagaaagacactagctcggacagaaacgggaaaatgaagcactagttgcatgccatccgttgctgtcaagcgcgatatacgtgatactgtacggcagacgtttagagaacgtcgcagagtaaagccaagcctgcaagacatgcgaaggatcatgacaataccagtaacctccactcgctatcacaccgattcgctcgtctcctccgtacgagtcatgaacgaccacttctatcgaggcatatccggtccaaccaaccaggcgagagaactgctccccctcaaagttccccagtcagcctgcgccgagcaaaccatggatggctatgcagaaaaaggcagcagtctcgacggccggtgtgtatcattgggtcccggggattcggggagtcgggggccctttttcccttttccccttctgccgtcttcattaatgtaggtctgagcttcggggggaaactcttgtcccggtctatcgcggctgtagtggagtgggcccgcgctgatcgacggtaacctgccatcgcgtccagggttggaatcgatatcgtgaccggcaaatccaccaagtccagaccgccacatccacgctgattggctggcttcgaccggcgtaataaatccggcgaaggcccatgccaggaatggctcgattgattgtggcacgggggccatttgctgggcgtgacctgccgtgccctcattttgactactgctcgggttcccttccgtggatacgtctcggatcgtgccatttcactagatggtacggggtcgattgagatttaacttgcacggaaacgccgatctataatttgtaatcttctcatcggatttcggcttgtccaggtctccagattcatccgtcgatgttaaaaatccaacgccacgggaagtcatgaactcattgaacgcatggaagatctccccgaccagtgcttgtcagatctcgccattccatacatgcacggcggttcgcgcttactcggggacatactctgaactcatttccagatcaagattagcagatacgagcaattgctttgacggtgccccaggccagaccggataggccatggcatacaaggatgttgccaaagactggatgtggctgtttacaagtacgacgagcgcaccaaccaagccctgcagtttttctagaagactatcatcccccgcggactggctcgtgggctacttgggaccttggacgcaggaaccagccacgttattgcatgccctctcgccgtgtggcagtcttggccatgcatgttttctttgtctggccctcccccctgtccttgtcgggcactcgaaaaccgcctagagggacgcagcacgtcaatcaattgctagaatagtggagtgtagatgccatgtgtgatctacaactgttgaaggctgagacctgcagcatgtccatgtgggctttacccctggctcaaagaaggtggggagttgatacaagcctgcgcattgagcttatcttttgacctttttttaatccccaggtggccctgtaagcatcttattcgtggtccatatgccgggatggtatggggctgagccaaaacggattccacgtgtttttgaatgatcaaagcgatcaaagaaataacattgagaccgtaaccaagctctttccgccgactcggaggaaagtatttggactcactttgtagtgtttcgtataccaatcccattcgatagtcgaaacacctccaatgccttgtccttgaagtcgtacagcccttagctttgatgcagcatatccttaatccaaatctctaggaccaaaaatgagggatcaatagagtattctccgccgtaccgggggatcatcggtgccaatcactaaggcgctgtcaaccggaatttcaaatcccgttcccaacaaggctaatcgacgacgaatgaggtgctcaagcgtccgagccattgctgcaactggctgcgcactcacgaactcttctctatcacgtatgaacccgattgacagctaggatcaccccgctcaagcctccactgatttccttcgaaaaccttctagaagtccagagccccgacagaagaggataagccccaactctaaccgtccgttggtcgcagttcagtctgctgactcgactgcgttcggattgcacaatgtgcacagactcagtctgaccggttaacggcgtttcatgtcagtccttctctttcatccctgatcgcctgtccaagtgtccaagtgtttcgagtgtttctaaagatatcctcgtttcaagttattctcgcgttcattgttgctattttcatagcgatagcaatgatagcatgggagaaagagagaaagagaaaggggccggggatcgatcagcacggggaaaggagatctacatttgataatgaaaaccagcataaaagaagggtgaaggggcggactagcctcagcaactttgttactcacattctcattcgatgccatctagacatgttccccgataccccgatgcccatgtccgataccctgaaccttgcaccctagtccccatagtcccacgcctttagcaggggccctggtcaaagtggccaaatatggctgctgctcttgttatcttgcgatctgcctgtccttacctaacagataatcggccatgaaagggcctgcgtgtgtttaacttcgggcgtagctgcattcgatcaccacacacgaacgccatgccacctgttgaccaggttctcgaactcaattgcgagttgcctcaccacaagtcgaccacggcccgcggtcaggccgcgatggattacgagagccagaaagagcggggagaagttgcacaccgggattgacgaaactaaaaggagacccgtaggccgtagaccggagttagccagcagccaacggtaaatcacgcgcaaacggcggatcgtcatttgacgttcgcccgtgggccgtgatgggccttgactcttcttcgagccccatacaacctaactctatcctatcaaaccctaacctttgagaaaactatcgtggaaaagaaaaaaaaagactaataatgtccccgacaagcgacgaccgacatgggtggataagatggtgagatcagatctgggttccccaattcccagaccgccacgaggcaatcctcctgcgcaaccttacacaacagcggctagatttaatttgtcatgcttgtataccggggtctgatgcgcttgatacccaaaggggagaatgagctgcgtgcaataatctgcaagcctcagccatatagccaaaatatagtcctggcagcagccaacagttgggatttcctcacgattggtgcaaatttgggaccgttgacggtttatctgccagaatacgggcgacgaactatgtagtttttgaggcgtccttcgtgctgcgtacggagtactccgtagatgcatctcttgtcctgcgctatttttcctgctatcacaccttgcctgttgtggttaatgtataagttgtagaagtcgtgttatccctggccaacattgactacacgtcttcgttcctccccctcttccctcggttttctctcttttaatattttattttgccaattcccactagttttacataggggctgtaatggacgtcgatcttcatatcgaggattcgggggaatagactttgcatcccccctcagatgtggaaagttgatatgtgtgatttgggtgtcacaactctaacgcccgacgacccgttcctcggagatcggactgcccgagacgctaggtatgtttcttgtttctgattgattaacttgtatagactgacattcgcttgtattgtccaagatcggtcgagatggtaccgtgtttcctacgagcaaagtccaggctaagagaaaggagtcagagagaggctaccaggagaaattgtcggagatgctagatttggattctcgggtatagcggtctattttctgtgttctctgtctttaccgtggtcaagatacttgatttgattatcggacgaatgctttccatggtcaacattctccgcggtcaacaccagttctccaccctcagaatcactgaaatcaacaagtacaatctaacgcccagagctagccggatgaaccgagacccgatcactaatactagcaactcaaaagtccctatggggtactggtccgtaccccggcccagattaaccctagaggaccctagccccatcgaccaggaccctggtcggcttggcttccggtcacctgttcagagatcgtccgcggacatagctatctccggaccatccatagccctactgtaccttttacaatgtacgttgtccagatatgacccgatcggcgagacgcgttactcaatttgtgcaaatcatggacattagagttcgccgaaagctgaaatccatgactcagacgaatcagagacatgtggcatgagctagaaagggcgaggccaggcgacgacaagagcgaagatcgtgggtatcagagtttcgcgcgacgtatggcgatagtgtcacccatccgtcacatccaacggcgccttgactacggagtacggagtacggagggcctagtgcagggtaggactgctccactgcgggtatcggtgcactaactatgttgtatcagtgggttcagtatgcgggctttcggctccggattctggcgtacctatgtcggtactgattctcagggaaaacggaacgaatacgggatacgaggggtttttctctacgcgctaagagaaattaatggctgcctcatcgcgaaacatcctggtcgttatccaaattggaataggaatcccgatcttcaatctgtaggacgggttgggttcctagttgggtctggtggatttgaggggcaaacgatgggacagagggattctccgcttgggaatatgaggagttggctcttgaagcaggggccagtgcttggtataatattatacttctacaacatataactatacgttgtagaagtatagaagtagatattgtacctgatctatgcatatggtggagtacgtactttgatcaaagaaagagatctccaaagacaaatgcaattgtctttcctttcgttcaaggaaactagcctactagcctaatggcttactggcttactggcgtagctaggtagtggggggtaagtagtctgtggccacccgtgtcgttgacaaatacttccctgctcgcaatccattcttagacttgcttttctattttatgttttataatcatgacgtctgtattcaaaatctgttatatagctctccccatattccatagctatagcactatctttgtaagcatctaactctccagaacggcagttacaccctctgagtggccgggccggactgcgaaactccactctcgctgttctcccactttttcttccacatttccagacaagaggctatgagctgcatgagtggagaaaaggatcaagaacgcttggatcatgatcgtgtctgccgtgtgaacctaataatacgtctatgtgccgtacttagattgccctaagcttattctggcaatgccacgaaaggagctacggagttatgcagtgtggagtacatatggagtacggagtctccgtaacgaacagactaaatctctagatcccgaaaagcgaaccccgggtctattttctgattggatcggtaagcttcattttaatagctaatcattgccttccaattaatatagttatccgtccctggcggtctcgattctcagccacaagaaggcgaactaagtggctactccgcacggcaatgagacatacaatatcatagctacaataccatagcgggggattcgggatttacaactccttcacttgatcgtagatcttttggtttggacataccttggaacgtatagatgtgcagatatagttagtcccagatctgatcttgttgaacatcgggagagaaaccatggtaaacaggtggataatgacattgacattcccattcacaccggagctcgccgtctgtagaatccggatattgcggatattgtagtctatggggtatacattcgcctgtgttgggttcatttccctaaatcgttcattttattagaagtttctctattttcatcattagcctaagtactccatacaatccacaatatccgtgcccaaccccctagagtaaacttatgacagcaatgacacattgacaggacggcagatcaactaacaactaactagttagtcctgttacctgtattacaaacccaaatagctgagatagggggcaagggatgagcatgccgctagcgctacaacatacacgattcaatgcatgatctacgtcgatcgcctccggttagcgcctgggctaatcgctcgcaagtaggatgtaagttgactgcgccgcatgctagacccgaccgagtaggctagatgctatcgccatactttttccaacggctttagtgtatcggtaatatgtccagagtcgtacggcgtatccgtacataggtacaatcgtggagtttgcccttgctcatagtcatcgggcatctgcctaatcctaatacatgtggagtgggacatgacgatgggcgggaagaacgttcttttgtcactcctttttttgggtctctcctttttgttattattatctccggagccgatgcttaggctctattgtgtttgtggtaaatgaaatgagacaattaagtaaagaaatggcataatatgattgagagacaggggctggagctgcttcaaacgctgtgagccgcattccgtggtagcacggagtactacctagctaggtatgtatgtagctcggtatgttagtaggcgtatacggttggctgtgcagctgggtaggactgcgtttaggtattgcttttgcagcaaggggtatatgtcgatcgacgtatcagtcgatttggatctggactgggcgtcagacttttgtgttgacgaccacgttgttttcgatagtcgataggatggatatgcagccatcttgtaaaggaagcagatgttgatctgctttatttgatcgactgaaatggtttacaataggttaaactgtaagcacttagtttactggtttgcatatgtggctctactacttggacagggctgcatatatagatctaagatgtatacagccttgtccaaacatttcccatctaccttccatcaacttcagcaagcaagtagttcacgattaatatcaaataacattgtctattaaaatacacttctccttgtccaccaaatggtgcccagggccagaccatctgaaaacgccgctcgagtccccatccatcttaatgcattgtaaaacaggaaaggaacaaacaaaaaagggtctcaaaacgccagcccaccacagtttcaagcagccagtattcccacgagacagacccccgacacgaacgacaaggggaaatctcgctttcaaaacacggccattcaacaagtttgactgcaatcgcagaacttttggaaaaggcaaaaggaagaacacaagaccacgagcgtccaccaggccaagaaggcttcgttagacagatatgaagttcgatgtatgaaatgtcgtctccaaagggaaaatgactccggatcgcctggaaaaggataccggatggataccattcgcgcacaatgatccacttgcgcaacgttctgcaaaagctaaaacagacgtcgaaaaacagtgcgaaagcacagatcaaatctgctcaaaacgcacggtacgacttgtggctttgggttccgatgctttcaggatatatccataacggtgattagatgttcgcagactcaaaaagccaagaaaggggccaatagaaagggtatttggaaaaaacacatgctgttcacaccgttgcgctagaaactcattggttttggccattgctttcacgccgaggcgaaggaacaggatccgggtactgggacgtcccggaggccaagggaggaatgcgactcagcgatggtgacgacatcagatgctgtccattgctctggtagtggtggctctggtgtagcattgaagcattctctctcagccggcgttcctcctgctcaggtgtcatgcacttgacaggcggggggatcggagcatctggggagctgcggcccatgagctttgggctcggctccagtctgcggatgggcggcaggactggtgcgcctgccatgctactgccagtaagcggacgaggtgactgtttggtcgggctaattcccgacatagccatgccgtgagaactctgaggaggcgaagagtggttaccgttgggcgtcgtggcagagaaagatggatagtggtgagacatcgacggagtagctgtatgacctgattgcggacgcggagtctcgaaagaactccacggagatgtatggcttgaaacagacgggaagccggcaatagggccaacctcagggttgccctgggttggtgacatagatggttggttttgaacaggactttgggcagagtgagaggaggagggccgcacagggaacgatccaacgggcggaagttgaggagctgattgcctaggcgggaaggagtgctgagaggaggatggccgcgcgtgctgctcggtggtatgcagcaagcgattcatgccctttggcggggaaactggtggacgaggagggcttgaagatggaagggaagtgtgatctgtgttatggacccggcgctggggagacgcaggaggatagaagttgccatgactaacagcagacgagtgtagagtgggttgtgttcttgagggttcgttttgaatattagatagagccagatgcgatttcttcacaggcgagggcggagcacgatcttcgtcatcctctaacttcagcttcttaccgactggaggagcagccgaaggagatgctgaggcgctgacccggaatctgaggggtgggagtttgggcttgatggaatcttcctctttttgcttgcagtctcggcagacaaagtgaaagtcttccttttcggccgcttcctgtgagatcccaagacacttgctatgctgccaaacattgcatttttcgcaggcaacactgtgacttccatcatcctaggaaaaggttaggctaaggctcaggtgcttggagactgaaactcaccaagttctcgccatacactccacagccagagcaatcaaagatccactgatcatcttgggtaagccctgccaggttcttctgggacttctccaggtcagcctggaggtttcgggcagacaccctactttcacccctgtcaattctttcttgttcttcggcgatcctttccagctcagcctcatgcagcagtcgcttctgttcacggtctctgatgcggtgctcgcgagtcattgtacgcgactgtcgatcttcttcaagctgactttgccttgcctgctccttacgagcctcggctaggtcgttttcacgcttctgggcggcttcggcagcctctcgatcctgtcgttctttttcttccttggcggcaagtcgactagatctcttagcaccggcgacaagctgcatattcagaagctccttttcacgcttctgacgcttgcgctgctgcgcttcctctgccttctcgaggataggcaggacatgctcaactatgctatcgcgtaggtatttctcgtccgcgtccttggttttctggattgtctccaagaaagcctggtattcctggagtgtgacagccacacattcccacttgaaaggatctttagagaaggccgcgacggctgcatcgttggtatccttgctttcctcgtcggaaccctcttccgccgctgccgtagatgtacgctttgacgttcttgatactcgagaagaccggctctttgccttcttcttgggacgctgaggagggggaggtggaggagggtcggtgcgacggtagaggcggttgtcatctagcacgtagtatgatcgcccttcgcgatcccagccaaactcttcaatacgctgggagaggtcagtatgcgatcatcaggggtcaaatctatacgagagatagcttacccattctgtctgctcggtttccttcttttcgggcatcttgtcgcgaatgcggtccgcgttccagaatgtccataccgtcagctggtggaggacacggatcttggtgaaaacatcgaaatacaggaacttgtttggttcttcatcgtaaccgaagggattagtgatattaggtgctttcgcattgtactggcgtcgggtgtattcatcgaaattgtcgaatctgccaacatagtagtgtcagtgagactcaggataccgagaaatgtgttccagtaaacgtacgtaagaccgcgatgcgacgaaatccacttgaggagacacaatccaatctccagtagtttatgagagggctcgggtttgagacattcgacttctagatcctggcgggggcaaaagacatcagcgataattcaatcaagtgagacctgctcgtgtattttctcatcaatgcgacaagaagcgcacagcattgatctcagtccagaccatgctaatagacatacctcaatcccaaagtcctcgtcaatcttcatgacctggccaaagatagcaatgtattgcatgaggcttgcaaatgcccagttgctcctaagctgtgaaagcaaaccaggctcttctggtgcctgttgctcggccaccgaggcgacctcggagtgggtgcgctttcgcgatcccatcgcggcgggacaaccgttaaggccggttttctcaagggtgtcaatgagggggttccctggaacgaaaatgtggcggagatgaaagccagagagtgtccaacttccaaatgagaaattcgagcgtaaaaattgaaaagggcctaagaaatacgaaggttgagtctgcactttttttcgtgtcgtgaggcaagacgatcagtaaggcggcgcgtcaaggaccgtgtcacgtgaacagatgcgtttgtcgaatttagcaaggggagaagggaggatgatagctgaagaggaaatttaggggatcatatcaaattggtctaatcttattctcaaattaaaagggatctatacaatgagattatgcaaacaatggaagatcgaatattcatgaatcggagacaagtacatccatgcttttgagaacaaagtcgcatatacacaagtgaaaacagaaaagaaaaaaacaaagcagacgcctggatctttggatatctctcgctttcaaaggtctatctcacacagagcagttggggttcgtcaaagacgaggagaaaatgcacacagacgacagcgccaaccagaattcgcgccacgacagaagagttccgtcgaaaatgaagatcaatgaacaatcagaagaaaagaagcatattcccacaagcaaaatgcaaagcaaagatagaaaaagaagaaaagaagaaaaagaaagggacaagaatacattaaacctcccccaacgcagattaccgaaccctcaagaaacccagtataaatgcggtaaagagagaaacaaccaggaatgaagaaaaaatgaacttggatccgatgccctcaatcgatgacatacctcatgcgctggatccatccagttcttcaaccacaattttgcgccttgtgtccgttaatcgccagaagcctttcccatgcatatcataaagtaaaatatttcgggagaaagaaacagatgcttttcgtatgttacattgccggggctccatccgagacagtgtcggacaagttgataaggagttgagccaggcagcgcttggtagctgcatcgtcacggaggactgaggagaaggtggcgtcccggagaggttcggggagacattgccgcaaggcctctcgggcccgactgttgtcactgagactgtatctgttgttagagacacctatgaagctggatattgcacaaggactcaccgaaggaagcagcgcacaacatgcttaagaaggcggacagtctgttgctccaccaactgagtaaccatgttgctcaggacagtgcccacggcatagaatctttcatatgtggcgcaaatgtagcccaagcctatatcatcaagaagaattttctgtacgataaagatagcgacagttttgctcagctctgagcccgtttccatgatgcgaaggcagagagggataatctccgtagttaggaggaagttgatcacgtcagacgagtcattcttcaccaatgcgccgataacgcccagcgatgttagtcggaggtattcgaagggacgagacttggaggtggtgttgaggaacgggtagaggaaaagagggatgtgagctgaacgaggaaatatattagtaacctggtttgcacgggtcatgataaatttttactcaccgttcaagaagagagtgcgggtctcattgtgggaggcaacgcattgcaaaagcgccagcgcattgcagactcgatttgacgcggcggcagtcaactgagaagggttcaagagtggatataccgagatgatctcttgaaggagtgcagtcatgacacctgcaagtttccgaccgttagttattgtagacagggctgggcgcacgttgggaatggagccataccaaaagaatgccagatgaccagagccagttcggggacctgctcccgcttcttgctcagctccatcaaagcggattccctgcggtttggatctaatagctcggcgacccaaatgaagaccttgcgattctcctcgctgattccaccgtccatggcggagaccgcatttgacataccatctccacccatgccaccggcgccaccggctccctgcgcatggttcccaccaccattcccgctcatggcaatgcggccatagtgttgttgctgtgcggcggctgcggcggcttgcacctgggcgtgctgttgggcgaccagggaagcgtgctgctgctgcgattggtgtgggtgcggctgagcctggtggtgctgttgctgttgctgatgctgcatccacgaagggtcggcctggggatattgatgttggtgggagaagacgtgttgggtctgcgcttgaagcatggtgggtgatgagtcgtttcggagactcgtaatactccgaaggatcggaactctagcgaagcgacggcaaaattgggtctgggataaagttgaaatggggttaataaggtcaggagtttaatcctgagactgaaatcattgatgactgaagacaagttgcaagaatagtggtagaatgggcagattgggtcgaacaggtcgaacagaggagtgtggaggagggaaaaggcggaagtgaaggcggggagataaagtgcctcccctaagttttgtgtggtcttttttggccctgggcatgtctgtcctactgctatggagtccttgttctgtagctctataattattttctttgctgttctttatcttttgtctcatttgactcggattgaatttgcattattggtgttgtcaaacctgcagggcatccaaacagagcacattgttttctgcaggccaaacagctttctgcagccattacgattttccatgcagttccaaggttgctcatagttatttcatgccggtgcccggggagcatttacagctatcagacagtgataaacaagtccaagaatcatattctcgtgtcgggtttgtactcgtaatctcatatgtacatcgtagtgccaaacataaatctcatatcgacatcgaaacagggcaatatcgtcaatcctagatcaaatccaaaaaaatcatagtgtaaatcatagtgatacatcagtcacattataaatgcagcgccataaatgcataatcgaaccgaggtcgtcgaactgaagacagaagcgacaagactctatcatggacgggtgcgcgactgtcgtgaccgtcgcgtatccctcgttcgtctgtcagaacttcggctacctgtgaaagagaaacgtcagtaaagatccttcgttatggggatatgtgggggcggacgcactactccctgagtaatagtcggaatagtagtagtatgaacttgggtaggaggactcggtcttggcgtcgtcgtgctctctcgatctcctcaatcccaaacatagagcaagagcaccgaagataatggcaattgtgccccagccccatttggactctttcttttcgctaacgtcgctgccttccgcggctggtctggatccgaaccacgttcgccgggcaggagcaggaggaggccgactaccatgcgagtggtgggaatggcgctcttcaacataggttgtttcctgtctgcggcgcttcttaccgatgccgagcgctgcaagcaacccagccaagacgcccctgaagcagatgcaggcgcagaggagtagcaacaagaacgcaccgacaatactgccgatgacaattcctgcaatggcaccaccactcagtccgccacctgaggcttgggccccaatcaaatccgccccgtctgttccaaccggcgctgtgaatccctccgtggtggttggggcagaggttgccgtcacggtacttgccccattgctcgtccctcgcacgcccggcgtggcttctgacccggaatctgttcctgtagcagtagcagtcacaatagccgaagagctttcagcgacacattggccattgtcacattcttgcgcagcgtcgcaacaagtcgtgccgcacgtcgtctcgccgaggtcggctctacacgtgcccgcgcttgtagtagcagctatctggctgctccatacagaggtaacagttgtgaggtcggtatttgtgagcacgtaggtcgttgtgtaatattgatagtccccactgctgctatctgcacagacggcctcttgggcactgttggtactgcacgtctgaccggtctcacagcaaagccagtcattatagccacatggattatcgcagcgcttttcaagcctgttttctccgaagatgtctgcttcagctgcgagcggggttgcggctgcgtggagcgcgtagttgaggagtagggaaagtgtcgagagcactggcaggacggataaagatcgcatcgcaaagaaaaagcgaggcaacgcttgccaaaattcagtggtgaaacactcgaatcggagagtctgtggtttagactggagcggtggtcgtagtagtcttatctcactcgtatactggagagatcttgtcgatcacagacaaagatcaccaaatttttgaaacgtcaagatatgatcggaatgcagacaaagaataaagaagaatgagagaagtcaagagaaaagagttctagtttgttagctacacaacatctcccagcctctccagtatacccaaccacccgatttcctaccaatcgcctgagactttctttttatccggtggctgggactcggattaaatgagatttactgcattccgattagcccaacgctattttccgcctcgaataacaagccctgggttgcccccctaccggcgtcctgtcagaagcgatcaacgggttggatgcaggttccaccccgcatggcagcaatccgcttccaaggctatgtccaacaccgccatttcagaattgccatgactcaggtctaacactaaacactaaagaggaacaatccacttgtgtacgttgggcagccaagagtctcgtaaattgcagcgaagcgtggatgttgtggatgtcggatattccgtgccaccaatggcagcccaacgatgaattgtccaatccgttgaagaccctgacatacgattaaacaggcacaggcacaggcacccaggccccggagagctgctagagggacatcctctctactttgaaagcgatcaaagaatcaaaacttacccaagagaattattctaatcgataattactactctgtcatgccactcccttgctaggatggttcttttcttgctacaacatacaacatacggaaatatctctaacaacccatggttgcatattgaccgctatttcgatggctccgaactagcgataatatcaatgacccattccattccatgggaggtgcaagtgcggtctgccatcgcccccgaagagtgtcttaggtatcgtcagactgcttacgtgaggtcatctatggatggcgagactcctcgcatcgccaatattggccaaattgaaaatgtgcttcggactatccacgatcttgctccctgccgcctcatgtcaagcatcctgccgaagccttgaggtattcttagtctgcacgtctgccagttggatgagattttgaacccggctacataacccagctggcatgcggactggatgcgacgaactgggccgagtaagaagtacctgtgcaatgaaggaattcaaacaggccctgatgttgcggagcatatctaatcaatttcccactgttgacaataacgccatcaaccatttctatgctcgccaaccacatggtcatggattgaacagcaatatgcagtctagttgtctcatcttgaattgttactgtctaatctatggtccatcaccaacttggaatgaatcccccttgatccaattaccgagatctttaggcaattagtttgacctgctaaaagatatcctaggaatgtgttgcaatgagctttgggaaatacttatgaatcagccaaagacattcctttgcttgtaaataacctaggaattatgtaactagtaccaaacatccagcttacacggagaaaaggcgttcgtaattatggaatagattatcaaactatgtatcatccaatttcacacattcatcttgacaaacaaacctcttactagactctgccactgtcttgtccacacatatgtactccgtatagttgtaggcggtcattttctgcccccaaacagggattatattgaactttaaggatgtcttttcgcccttcggggcatatggtcaaatgaaaatatacagagaagattagcatggcccctgcactaaggatgacacgctcaatcaaagagaagctacctattttttttcttttacaggtcctttttgaggttatacaggtgtgggtcattttgacgcggtataattggtcttacgccatcgggaagtcacgtgcctgtctgatctccacggtgggtgtacgaatcccggaccgcacgaaaaagtggagcatttatcaccaacccacggtcaggtcatggcggctctgtgttatagttgaaaagaatgtcgtccagcctagatagtaataagaacaaaaaccatgacaacttaacgtgcgtatatccttttcatgaacttaccagtatcaaatttgaggttattcccaccttccttttgcttctggaatatctgttgaaaggtcacctgacctccattgtttgctcctgctacttattccacaaacctgtagatagtttcttccttcttacccgcaactgaggtcttctataagtcatatatatcatcgagtgggttctatataagccctttctcaacatccttcatatactttaccccattcttatctactgagtcatcatctatacatcttgggttaaaatatcagaacttcatcatcccactatctatacataaaccgagcaatgtgagccttctggagtctaggatgaatgtatctctgacacttgaacagcgagtatatcgaaggattctacctgttccgacgtgggggctcttgaaccacgcggtggatgagcccgtcgaatcggaatggcatccaaacactcggtgcggtgatagcgactacgaatatcaacatccgtcttggtgatcacaagtcggcgggtacctcttatcggaaaccccagatatggcaatggtcttgcgaaaatccccggtagctctgacggtcgtcggagaaatgaaggtaccacaactgtcacatggaagacggcaagtttgtttcctgtgtccgcatcccgggcatgggtgtctcaacaattgccattttggcaaccagaaccaccgtcgcgattgggacgagggtacccaaaagaaaagaaacaccagtgaaacaagaggaagacgagcagcttgtcaatgattcgaacctgaaaccagccaaccgacaatccaggcagctgcagcgggtatagaatgggccatagtgcataccatgaggacgattggacaaatcgttaatgagtctctgctgaaccttctcaaagctctcaccatgaacattccaggtgtgtcctattgatagttgctgagataaaacgtgaagtcaaaagctgaagcctcacctacttaggtccacgggtcggatgcccaattggctaaggcacaacatggaccggatctcgtttagagtagctctcgccctcttctctcttcctcttttccctccctgtccattcgcacggaaccgaatcagacacactgtttctcattatctacactatagcagattcctattatctagtaataaaaaagtcgaagcagtcccgggagatggcatcgaagggacatcgaaccaccacaaggaaggaatactagattatgttttggttataatgaagacgaacgtcgtgcttggggaagttcagatgcaaagaggtgatgagtcagggtccatcgtgtcccgaagatcaaaggagctggggccgcgatatctgagaagaggaggaaattcggactcggacggagaggttggagaggaagaatattcagcgagaaatgggaattaattcagacatgcaatattcccgactcagtaggataaaagaaaagtactgtctaacccaggaagaagtcaacggaagaatatccagatattctcctcggagaaccggtcgaccatcttgagcgtgatattgaacgaagacccatggggaatggggtttaagcacgggttcaaaattcaacgctcgggacggagtaaaaggaagggattcgaagagtatcataattctaggagttgctccacatggcgatataaaatcacaagaaaaggaaaaaatatacaaatcaaaagaacgtattcaaaatgtcgtttcagatccatcaatcatataaacatccccgcaaccccaaccgccagcccaaagaccagatcatggagactcgacatccgcacaggagaggcatcattcccattcgcctccgcactagcagtctgcgtggcaacgctgctacaataccccaaattgataccatggcaagcctccaaactcaagctcgagcaaatagaagtcgcctgcgacgaagccgtgacagcctcaaccgtcacacctcccccagcgccgtcaatagtaacaccgtagcgacccatcagcgcgccagtgcattgtgtgtactccgactgacacacagagtagtaagatgagcaactctcagcatttccaaaagaagtcgggacgacgacaaatggatacgcggcgtctagcgttgagccggttgcggacgtctcgccctcggtagtggtggttgcggttgcaccgctggggaacatgaacgcggtgcctgtgcctgtcgtcgttgttcctgttagactgccggtgcagcttgcaccgctcgcgcagcaggcgatgttgttggcggcatcgcgggagcagttcgttccctgcttacagcatgcgtcgccgttacccagatcggtgcaggggttgtagccgctcggacaattgttgtcggctcgtctaaggatgcggaggacttcgaatgcccgtttgttggctatggctgcttctgcggcggtgaagggtgctgtttttgtcgagtggacggtcgaggcgaggaatgtggcggcaatccagatccacctggaagtccgcattctcgggatctagggcggggttggaatagtcggtttggggaatggcctcgagattttggttgaattgggtgagtttaatggtttattctcatgcttcgtttcgtcgttggggtcgttatccggggttgggctgggtgtcaacaaactactcgaaagagtaagattagctttcaccggtcgcgatggtgtaattgaggactcgagacttgaaaatacctgggtacttgctgtctgaagggagattcgagggattctagaaaagatcggagttagagcacaaatgatgtagttcgcaggtcgccaggtcacaaatctccactgggatgccccagcaaccgcagcccgacactctagatcggaagcccaagcttagattaatttttaggttaatttctattgacgagggcactggtagtaataggtagtagaataattttaataactactaaaatataatctgtgaaacaaaacgtggacacaattcggcactcgactacggagcacgaagtattgaatatacagcagctgaatggctgattgggcatctgaatattcaacaaatgagtcgggcatggatgttaccagtcaggagcaatccagtaattcttcgcactatctatatggaattgatcaattgttccctctacgccgtctcttccaaccgtccaaacaccactttctaccagttctctccaccggtctatcagcctctccaatctttgagcccgtctttcaccaccaaacggatggaaaataccatgttgaaagagttgtgtgacagaccctggcgaaattgatgtcccatcactcattctcgctccgtcgtgatcccagaaaggtagcagtagacggaagcccgcctcctcgcaatcgtattggcaccgccgcaccgactcactatatagccccgttggaataagatcattctcgtcgaatggtatctcatctccgggcgcaaagaaaagccatcgaatctcctccccgaaaccgactgtgtggctgctatctgcagctgcgaagattaggacgggcgggatattgttgccccattcctcctgttcgcgaggtacccccgtaaacctctgccgagccgtgaaagccatggtgtcgtgcggaacctccaagccgggcgcaatggctctaaaacggggagttctcattctcgtcagaaccaaacgaatgaagcactcctccggtatagacgccgcatcaagctctacgtctgtgaaaagtggcgcatctctggagacaggcaaaagagatccagagggcattctggcttcgatagccgccgagtaccgatctatagcagccacagtactgtcaacctgactaggacaatatggaagccaagaccaaagcccgatttgcgaccgggaatttgccagttctttgggcgcttcgccctctggtgaatcggtcgtgattttaccgatccgaagcatataaatccagtgggtaaggatcgtttctagtgggaaccacatatcctcatgctcgccgatcggctccacactatccagattttcgagggtcattgggaaagcagcacggtgcagctgctggtcatagacgaccccgacacaatgcgagcctaactcaagcacagtgccataaataataacgaatcgttccagatcgtctaagtcgttgtcctcacccagaaaaatattgtcgaccaactgcattgagatatcatttatccagtaaaagaagcctggctcaggcgagaatatcgaatccaggaaggaattcactgaggggtggagtcgttcgcgaacagcctgtgtatcttcgtctgcgaaaatgaagggttgactagctaacacatcgagattgggcgtctcttgtccgtggcgggccatccatccatacgcaaccaaatagttgtgtagcctcgcacagcgctcataatcgaggggaccattgagacgtgcagggttggcctccgacaccagggcatcctcaatgttgagaatttgctgtggcgttgtattcatggtgaattcatggtatgcttaggggcgcattgaaaacggggctcaattctgccgattttgcaggtttatcaacgccaataccgtaatttatgcaaaaaccggggtttctgggccccagtcacatgacatgcctatttcgaccaggttgtcaagttgctgcatgtcttaagaggtggtgtatcgccggacagatcgatccgacgaccgatctattcgtgggggcatggaacaacgcagtggggaaattgactctttattttgcattgtttagtgcttttccagccacttgtacacccggtctgcgatctcaaggttgttcttctccatgaagaacatgtgtccgttgccatgaataccctctttgcctagatctgcgtactcaacgtccactccagcttgctccagatacttgacggtgcagtaatcgtatggcgcgtggaacgatgcttcgcctgtaacaacaagttctgggattttgcccaggttcgtcaactgcctcgctggggatttctgcatgatgcattggtcgtgatcagcgtcgattgctggctcgatggttgtctcaatattttcggcattctcgcctgcagacggttcgtatccgattgcgaggtcagtgagaccgaaagcgaaagctgggtcatttccaaacggcgggcggagcgtgaacggcggaccagacggctcgagttggacaatacctttgactaggtctgggcgcatgtctccgaccctccagcctattcaatcgttaaccacctcagcgagtcatagtgcttggctgaaatcaccatatgcacccgcctgcgaatgactgatgatataacagtcaccgacgaggtcgactagagctgaatacgcctgcgcattttgttcctcgcttatgaagcggtcggtctggaattgcatctggctcctgtagaaagcgtcgaaagttgagtcgccaatgcgaccggtgccaggccattgcgtgtgaagcttcgcctgtggccattggttgtcgttgtttgctacgtcggtgaaaatatcagagaccgaatcgggggagccgatgtacccaatacttccctgtccgggtgaccagaaggagcgaccgcgtgcgggctgatctgagaggtagactgtgtgacccttggagatgaaataggatgcccatcctggccgtccgtctggagtatcaagaaaattggtgccggtctgagccgcgcctgcaatgaaaataatgggaagtggtgggttcaccggggctgactgaggggagagcttctcgacgtaaatttgccctatcataaccattgatgtagaattggttgcattttcctgtttgacgacttagatacgcgtcgaattggtgggaatcaagacttgctgtgatgttcgtgtatcgtccgccaacgtagagaacctcgcgcctaggaacaatgtccctaagctgggagccatgagcttgcacattgcctcctagagaagcgaaagcgacatgcgtcaaatatgtgagggaagccaaggtgcgaaagctcaacatattaacccaatctgcgaaaagtgaaaagagctccagctcgaatatgtagtggatccgtgtacgaaagggtattcagggtccaaaccccagggtgacaaccccaggttttggggtattttgatgcctgaatttccacacctgccttagtaatcaatgtacaccgcccggctctgctagcatggcataaatgaagcttttgatcccatacaacatacgaatccaagttcgggtttttgccctctagaaatatatatattgtgctaataaggctcattgatgattatcgacaaaataaggctaaactaaaaatatcgttgagatacaaatgcatttatcatgtggtttgcggtgacccggtcgcttgtgaaatacattaatgtaccacaaggtgagtccgctaggtgtagaacctctcaggcattgagggtgtcgaccggctccggctgtcgcgaccggaagcgcttgaccagattgctcgtgttcagcgcaaccagcttgctcgtcggcatcaagaacaactcgtcgatctcctccagcgtcttgtccttggtctcgggcatgaagaacagctggtagaagaagcctaacgcggccaacccgccgaagaaaccgatcgtcaggccggtgtaggtcatcgcctcctgcattccctcgaagttgtatgtcacgatgaatgaccataggtaaaggaatgtcgagcagattgccatgccctgactacgggtgttgaaatcaaagctctccgctgggacgacccaggtcagacacgaatacgcgccgaagaagcccatgtatatcacgaggccggagaagaacaagcccaaggcagttgctctgtgctcattgaagtaatcgacgccgttatttgtgtagaggtagccgacacccaccagcaccagaccgacgatgaacatgaggatgttttgtgcccacacgcgtcgtccgaatctgtccatggtgaacacggcaggaaccgttccaaagaacagcgcacctccgccgaccatcgacatcagcactgactcgcggtcactgaaattcatcttggccatcaagtttgacatgttgtacatcactgcattgatacccgtcatctgtccgaagaagatcattgccgtggcatagacaagcgcccgtctgttgcgcggctgcgtgcacacttgcatgtatctattgtaccatgcctcgctggtggtcgcgtcgacatcatgcttgactgtgatttccatcgcaatgaactcgtccaagcttttggggtcggccatatcgtgcagcgacttccacacctgccacgcacggccagtcttgttcttggataccagccaacgcggtgattcaggcaggaagcacattccgaccaagaggattgtcgaaaacaagagagacgagcccagcatccagcgccagctgcctgaccgcacgtcgaagaacacacctccggccgcgtatccaatgatctctccgaaggcgatcatcagctggtacacagacaccaggttgccacgcacctcaggtggcacacactcggagatgtagatgccgacacagccgccttcaattccgataccgatgcccagaatgaatcggcccgcaaacagcattccaacgctgcggcagccggcacaaagtcctcctcccagtgtgtaccacaaacacgagatgataatcgagttacggcgtccaaaatagtaattcagcggcgtcatcatgaccgcgccggccatagcgcctagcggcatcagcgaggaaatcagcgaaatgtcggttgccagtttcgggtcctcgaggctcgtccaatcgcctgaggcgatgaagtgcttgcggatgccaggcagcgcgccggaaataaccgactggtccaaaccactcagcatgccgctaaaggcggcgaagacacccagcgtaaggactagcatgcgaggactcttcatgtacactggtatttgtgcgaacgctatccggtcatacagtgattcgctgccgagatactgctaggcctgttgatcgcgtgcctcgatctcgtgctcacgctcctcgggcgtgaattcatcgctgaactctttgcccacggtgtcgggcttttcctcatatttgtcgtgcatttcgtgtggatcgtatcagtcatgcaacaaaaattaacttgtatgggatcagaagagaaagagaagagaaaccgacgagacggcccgaatgccgctctatataagggcgtatttcgccgaaaagcctttctgcgggatgctgtacttctcctcaatttccccgacattcggcctggaccccacaattcgccagtgcacccaatgagttccttgcttttctttctcgtaaaagttagtagcatgtgtatcaactagtattgttgtggggtttaaatacagggaatgttgcgtgtcaggtccaacatttccgatcgctaccccagcatccccacgatagcaattcgtctaacgactatcaagcccaacccagaccatcagagaagaagtgttcgattataacgagagtggaagactgggagctacgacctttcgaaaggccactaaatttcaggtcagtcaaaaaaaaatatagaccctgtccttctcatgacattttttggtaagaccggaatggtcggaacaccacgaggatgtttggctcgatcaagtaatagatgagcaacgcctcaaaactctgagacaactcaataaaaaacctccctcgccccggtcgggatgacctcggcacgggtgaagttcacggacttgtacggtgttgtacctaacaactgccgattcggacggttcggctagaccggggttggctggggcccctcttgtgcggaatacggagtagtagtttacggagtacggggtactccgtaaagcacatgatacagccaaacccgatcggcgccgagaaaagttcgcaaagccggggcgctatacctaattaggaaatcattgcgctcctctctatggtggaataaaccgggaccatgcatttctccaaagtgaccggggtttacaagaaagtggggtacatttcaacgaggtctgactgtacacttgtattattctggaattctatgtgtcatgacccggtatttatgccctgaaacgaagtgagagaactggaactaatcgtgtacatgtgcacgagacgttgcaaaaaagacatggcttgactatcgaatacttggactgagacctgttccatattttgcacggagtggctatgctttcgagagtcttcttcacttgaatttgcttggcattcaaggggcgcaaccgttcaaggttgcgatcattggctggaaggtctctaatccggatgtggcttgcgaaatgagcagattgaaaatgctgatcaacaatggcagccgcctctgacctcattgtctgtggttcctcgcttgcgttggtctagaagtggatattgccaacctatgtgctcattcatggtggtgtacattgatgtctgtcagctgtctaatcagaaatttcctagttaatgagttccctcgagtgtggcctgggggtcatgttgtgctaacttaagtttctcctgagaggttaccaatcacacattatgttgcccctcgaacaaactaggctaggtcgcccgttgcccaggaatagcttggtgaccgggaagcatatcgatcctcgaacccttttaagaggtcaccacatatgttagactgaccattacacgtacaatcaaactaaatcggttattgattcaagtataatcaaacggttcgtagctcatgcacatgtcagtgttgaccgacgaactaaacatgtgtggtgatagaactggatggcacctggtgagaatctatttactctaggccttctgtatttactctgaacaactgaccaggcgtttaatagacattattggtaatacagcacggaattctccaccgaaatctatcacacatcacatgcatttcttaatatactggggacgccgctgacgcacgcagttgtagcgccccagaacggctgccggtgctggcggccagctggcagaaaagggggagttgtatccggtaccaagaaggaaaagtcatctctatcgtgaatagtatcactctggcaaactccgccacatcctcgacatacatggccgctttcggtcagcttttgaggggaagtttctcttctagaacaatcgcaagtacctatagaacgccagtcacctatacggagtaatccatgccgaaatcgatactcaatcggcatctcacattgccggatctccacttagatatatttacgaagcttatgtccaacctcggtcttataaatcggataccaccacttctagaacaagtcgagcgagcttttagttctcactcctagggttcaacgtctatcctttccacgccgttagtcccaccgctaagagaagagtcttaggaagcgaactgtctcctctatatcagagagtcaggacgaacattccacagggccgccctttatgccattatagaacctagaacaatcagcgaacctagtaatggaagcgggatgttacaatgatgtctcacctatcctaaattcttacgtctcatatatctcttgagttttcgggctagcgtttctatcagagcgggggggtatatattacccaacgccactatgtctaacagcaacgtatgactttgaagtaatcttgcttcactagttacatttcatcggttcattatacatgctggtccttcgtagtagccatcgccatctactgactggggcatataatcaacaacgtcccaccgacctagtgctggtctataatcaaatgaccgaaattgacaggaagttccccgccctcactcgatggccttgcagcatagacaccaacccataggtcctttatattttcctcttcaaaaacccaagtgacctcccggataggagacttttccaagccctcaacagaatagatccacagacttccatcctcttttttaactagttcaagagttgccgtaccactacccatggccccgggcactggaagcaagctccagtccgcccaattgtctttcgcaacgacgctaaggtggggtttaccgtgggtgaattcaataccgcacttcacccacttctgccccccatcggcgctatttaggacaaggaccacaccgccctggtcatatttcttctcccaaacggcattgacagcgacgcggatccgcttgaatgacatgagaggtatagatttgtataagataggggccgagaaggagatggtggaaggcggtttagcccatatatccgtggaagatggtgctttgatagtaaattctaggggaggagaaccgttgcctggaacttcggcgtccgagttggcgaatttgaattgggattgcgacatggtgggccgtggaatgcgacgaagcagttgtataatcaaccactgatatttgaacaatggtacaagtgaaagattgaagatttgaggaagtcagcacagagagtcagcggaaagataaatgactttgtcctggtgcgagcagaagagacacgatgggaagggctcgaactggcctgggggatgaggtatatcttgtataaggtctcacatcagcctgagaactattaggaagactgttatccaaccaatgatgtttaaacctatctctttcactgcgtttaacaacaaaataaatgaataaattagtttaccatagatggatgatgcttttggtgcgcatcgcgtatcaaccagactccgaatcctaatagataagccgcctgagatctcaattttcataggccctaaggttccacgagcccaccttccatattaggcaattccacattggtaatagttacaaggaggaccagaggcatacaccaaggcaagtgccgaaacattcaatttgggtaatttgatgagaacggaatacgagatgaaaaaagaaagcctattgtggaaagagggactccattttagaggcgtgctaggtgaaaaccaattgttttaaatgcctttctgtcactacagtcactcttatagaaaagccatactggtttcaattcagagttagagcaactcggtcttcactgtcttcacaagaagcaattttaggacaaagaacattcgcaatgcctgagaaaactgtagtcgtcattgggtgagctttttccttgtccggaaatatttgagagagcacaaatctgacatatttgcaatattatagtgccggggtagctgggctcacaaccgcgctgctgctgtccaagtgcccaggctataaaatcattgtcgccgcaaagcacatgcccggagactacgacatcgagtacgcctcaccatgggctggagccaactacatgccgtaagtaggaataattggccacggacaagaccgtaattgacaagatttagtgtctcgattcgcgggacagaagctgcggaatgggagaaagcgacatgggcaccgctcgaagacctcgcgaggaaccatcctgaagcgggtgttcacttccaaggcaagttgaaggcttgattttagtcagttagcagtggcatcgactaatttgattaaagaatgtgagattcatcgtcgcgaaaaagatgccggctcggcaacggcggattggtttgctgagctcctatctccagagccttggttcaaagacactgtgccagatgtaaggaaacacttcttcacctaatatcatgttttcatatttaccagtttgattatttagttccgtccgcttccaaagtcatcgctcggccccggtgtcgatgcaggaacggtcttcacgtcggtctgcataaacacggcgatatatctaccatggctcgtgtcccagtgtcttaagaatggtgttactttcaagcgcgctgtgtttagtcacattttggaagccgcggggccgagcgtctgccccgggaaggtcgatttcgtcgtcaactgcactggtctcatggcatcgaagctcggcggcgtgaatgacaagactgtcattgcggctcgtggccagattgtggtggtacgcaacgaggctggaaagatggtcgatgtttcgggaaccgacgacggcgatggcgaggcatgctatgtgatgacaagggcggctggcggagggaccatcctaggcggttgctatcagaaaggaaactgggactcccaggtagatccaaacctcgctatcaggatcatgaagcgggctgtggagctgtgtcctgcgctcaccggcggccggggaatcgagcacctggacattgtccgacatggcgttgggctacgaccagtgagagaaggtggggtgaggattgaaagggagcgagtaggcgatctatggctggttcataactacggcgccggtggagccggataccaatcgtcgtacggatgcgcgcaagctgccataagactcatccaagacgccgcggggccacagtccagattgtaaaattagccagtaagaccaagcaagccactagttagagttagcatagctccactaatagctaagaaatcagtcgtctcgccacattagcgggggagttgattggaaacccccagttactatctttcttccttatcagtcacctccgtacaacatacgtcctctcgtgattatatgtttccttccttgtaaactaatttcaaccacacggcatgggtccatctgggaatcgcactaattctctcgcattcgccaagaacgattgccacacttgtgcggctcttaaagaaggctgcgaccgtcagcgccctcggtgcggcacatgtatatcaaacaggagagcatgcggcggctttgccatggatctcgtttggaaagagctgccagttgttaatcatgggccattgcccagaggccgcgaatctggatgcagctccaagagagatccgcagcacaccttcaagttcacgcaaggtcgcccgaaaagacggcggaaaccgaggcaatcgaatactgtttaccagtcaatattggatctgggtctagatgattccctacgccatgatggggcaaactttttgaatactactggcaaggccagcctatcatttccttcgacacctcaaccatcgagtcctgaggaactgggaatcagcaaagattgcagtagccaatccaatgagtatatgatctatcagctgcaaaatgagacgcatctgtctccaggttgggaaatgggattaggaactatggaatatgttgatggaaatccgattgatgcatcctgcccagacacgatagagcaggctcagcttcctacccaacttactctggacccagaccaagaaacttcgccgggcattattggcaatctaaatcaagcgggcggtgacctcgctgaagagctgtttcctatgacaaatcttgaaagtttatcgaattgggccacagaacaagataccgataatcccgtgctcgaggaagatatgcaacccatatatccaataaaatatcgcaacctagctcacaagtatgagccaattctcgctatatgtacgtatacacacttgcagattccttgcaacgtccttcccactaaatatttacagacgacgagaaattctgcgtcatgccgctcaccagggattgtcgtatcaaccccttcagagctcagactggaagtctcgaaaactacgactttcttctgcatgcgattgtagccctttctttccatcacctctcgaagatgaacaacaccgatgatttgatactcgaaatgcaccatcaccgatctactgctcttcatctcttcagccacgccttaagccagccgacttccctgccacttcttgataccctcctgatactcgtcagtatagaggtatattttgccctataatcatttgctggaatataatctgacatatcctcaaggtctgccagtccgcgttcggtgcgtggggagtacatctgaatggcgctcaaaaacttatcacggaacggaaggatatggaaagaggtttctgtgattctcgcatgcgtgcgcagctggcgatgctcatatggtatgtctagacgtcttgctcaccctgaccatcgttctctgttccgtctgacacctcggcaggtgggacacgacaattgcgctcatgtctcgaaccgagcctcgtttgccgttctccttgttggagagactgagagggttcgatgacagcgatggatggtcctgcttcggcctaaacgggtgtccgtttgaactgatctccatcatggcgcgccttgcaaagctggcatgcatatatcaaaggaccatccagatggaatggaccatttttaacttccgccccgtcagaaccataatcgctgaggtaaaagggtatgtcaacaaagagaaagtcgaatgggacgaattgaacgacctttccgaagacttcaatttgcgacgcaatcggtactactgcatcgaagcatggaggcatgccatattgctctacatctatcgtgtcttcacgaagaagcccgacgatcgagaactccgcatgattgattacttttctcgtgttatacttgactgcgtacggtgcatgccgtgctcagacaccacccagaagcaggttctcttacctgtgtttctagccgccgcagaagttggcgacgaaaacacccgttctatggttcgcgagtattgcaatcactggagagatgtatctcgaatatatcatttcgaaacggcgtcttctctgttggacagcatatggaaggactgggatccttcgacgagaagttcatactggtggggactcaaggttggcccgcaagattggatgacgggagatgttaaaggtcaatctttggtgtttgagttgctcttaggatgatcataggatttttagtgtatagctctttaacgacaagattctagtttctcattccaatttgatgtagcagaaatatctcctttttgtcacattcacagatagaaacatattcttaggctgatcgctacaatttccattatcttagcagatatacgaggattcttctcctcgttccttccaaattgtacttgacgtacaacaggaacattgcattggtgtgggcaatgacttgcctgaaacagagcgagagccgtcccggagtacgtcccggagatcggttcatgagcggaaatactataatccgctccaatataccgacagacttccctcccatgtctatcgtcttgaattgagtactctttccaaagacctagctcgcatcagacaaaaactgctcagagtatatcatatataaatcaagtgatttcgtgaagcttctctaggtttatatctgcatcatgacatgcaaaacatattggcggagagtaagacccaaatcaactattcaacttattgtggatcattggactatagagaggttataagtattttcgatctctaatgtacaatataggaaaacaagttggctgtgggtaaaacatgaaaatcatagtcagccaacagatcataagcacggatttagtccctttctagcttcacttcgcccttatatgccccgatatccttttctttcacgccatcattgtctaccaagataccttcgatagcttcttctctcctagcgttgagcataccgaagtcgacccttggtcctttgaaaatccccttcttggtggtatgccatagcacaatcacaaagcaaacaagtccagtacaaacgactgacacataactcatattctcgggggtcacaggtatctcagtggggaaacagtagatgatatcgaggaacaccacccacaagactgaaatcgcattgatagtagacccgtactggccgagatcaaaatagcgtgctggaaggacccgatagcggccgcgccatagcaaaacagcctgaggaaggacgcaggacgtttgaagaaacacgacggctgcgttgaccatagccgagaacgcagtggaggatccaaggaagatgagtccatatagctattgaagttgttaactgagagtgaacaaaaagggttgagaaatgtatcataccgaaacgaataccgcagataatagaagagcatggatgggaacttgcattccaggatgtacacgttgccaatacccagagtaaggcagcgctccatcacgggaaacggcccatattgtgcgtgatgccgtagtagctgcaaaaatatcgtcagacaaacttcaaataacttttcacaaccacataccattggccaccaagttactaaagaaaagaaaggcgaagaaagccatgagaatcgaagctgccactcgagagcccgttccgttgtagtagatgtcaaacaggggaaggccggtcacagtgtggagtactgcatcaatatcaggggttgcgtatagcagagccgcagcgaagggtaaagttgtaacaaagcctgctaggagcgggtagatcatgaccttgggcacattcttagacgggttaggaatctcctcgcacatgtgagcaccacaatcgctacccagataggcgaaaaccgagtttgccacggcgagcatgaaggcaaatccatcggaagaccagcccgtccggttcgtggtatcggtaaagattgcagagccagaggcgtggtccttcgtgacgacgaacaacacaatcgtcgtggaggtcagtgtcagcacggccaagacaaacatcagcttgttataaagaggaatccagtttgccatcaggatattgatcgccgccgccaaccagatcagacagacataaatcagatacgcgtgccattgctttgggtcatagtccggataccaggcgacggtaatatcgagaaccatggaggcgacgaaattggcgacagatccagaagagagccaccaaccgatgacactcatccagccgtttctgaacaaaaaaaaaagattagcaagatagattttaacaggcagttcgaggaggagatgcaattacacaaatgaagcgaagggtctatagtcttctcgtgcaaccataaaagaccagtagtactgggcacctgcaactgggtatgcagacgctagctcggccattccgattgaaactatcgttgtcatgaccccagcaattgggagagcccagatagtaccgcctgaagaagcctctgtcaaaccgataccaatcgctgaaccagtgcctagccacgtgcatgtcagggtaaaagacaaggctcctagagaccatttggagaaccggcgaggcatagcggcctcatagccagcggcctcgagctcgagatcatcaatgttcgtcatagttcagaagcgtccaaagaatgtagaaaaataactgatcgaaaggatattgtaaggaaagaagcttcgtttttaactcttagctacctgtgtagatagttatcagccgttaccgtggtgcttgatgtctcttcgcaagagggagataagagagcattctaggcatctgagaaatgcctctttccattcttagaaggagatattgtacttgatcctagatcaattccatactgtgatttgattatctttgccttcatgtcttatcgtggctgacaatacgaatgatcgaagggtgcccagaagcggaagtacccaattaggcaagcgggcttgtctgcgttcccgctcggctttgtggcgaatcccgaatctcggttctgcctcctgcggtcgaatcacatcccacgcagacgacccatcctattctgccgatttaggaaatcgaggcccgtcatgtcgtcggagataagcgctgtcgatcgccaggattagcaaaatggcttccccagaacaatattatactgctttaggaaggagaggagatcagcagttgggcctcggcatcagaaccccctcgcagccattaaagcctatttaaaggtgtacctgtgtgacggttgataacaccatcttctatcacaagctctcttcttcttttctcaactccgtgtggttgtcttttaccctctattctccaaaatgacttcgatgaatgaaatcttcggcgcctacgctgcacgaaaagctgtgcttgaagccagcagtaatccctttgccaagggtatcgcctgggttgaaggagagctcgttcctttccatcaggctcgcattcctatgatggaccagggatttctgcatggcgatctcacctatgacgtgccatcaatctgggatgggcgtttcttccgtctcgacgatcatatttctcggctggatgctagttgcggcaagatgcgaatgcagcttccgctgccaagggaggaaataaagcgcatccttggacaaatggccaccacgagcggaatcaaagacgcttttgtcgagctgatcgtcactcggggcctcgttggcgttcgtggctctacgcccgaacagctcacccagcagaatctctatatgttcgtcctgccatactcctgggttatggagccagagatgcaatatagaggtggtagcgccatcattgctcgcactgttcggaggacccccgttggctgtttcgacccaaccatcaagaatctgcaatggggcgacctgactcgcggaatgtttgaagcctcggaccgcggcgctacataccctttcctcaccgatggagatgcaaatctcacggaaggctctggattcaacatcgttctcatcaagaacggcgttctctacacacccgagcgtggagtcctcgagggcgtgacccgcaagagtgtcttcgatgcggcacgcgctaatggcattgagttccgtgtagaaatcgtgccggttgagtcgatatatcactgcgatgagcttttcatgtgcaccactgctggtggtattatgccaatcaccgtgctagatggaaagcctgtgaacaatggccaggttggtcccatcaccaagtgcatctgggatcattactgggcgatgcattatgattcgacctacagctatgctcttaactacgataactccgagaagccatcagacgctgggcgccagcagagactttaaatcaagccttgcaattggtcaaatgtacttaggaaaatcagttagcctatatgaaacttgtgcggctgcatccttatcttgttacaagagtagtagtaaatctcttttctcgtctaaccattgtgtcaacgctcttccaaataggcacgtattgtctaaatctccgagtctcgcgtcgaccttgaacgtccacatactgctcttcaaaaacatcgtaggaatctggaaatctagtaatatgttaccacggccgacctgaaattcacagacagcgcgaatagtgaggtacgctatatcattgaaggacgtagtttttgacggcaatataacggctttttcgtcgtcgcaactaccatccgagtagacgataaagctgctcacagagagggtcgcattgacgaagccctcgtcaatatatattcaacccaagccacaatctctgaaatagcgttgaactctcgcttatctactttgggacattgcaaatacgagcagcgagcaactagttaatcacatttttactactataaacaccctttaatcatcgtacaaaagtgactagattgcccaataaatccatctcacgaggaaggctgcccaatttagcaaagccgaatccttcaatcaaatctttctcccaaccacgacataaacaccgaagcaataatagcaacctaggcggtgcaagtcacttagcatagcctccctcagacttacaatctgatccatggattgtatttcattcaacttgtgcattttgaaagcagcagtcagaacatgctggattccgacaacgaccgtgagattgaggtcttcccgcgtggccgggttgtcaagagtgtagatccgctcttcacaggattccagtccagatttctggaaagtgccacgaagggtagcaatactaaagggagttagcctctctatttagtccctggtagtcaggcttactttggtgttttcccaagcgaaacaagagtcctaaggaataagtcggttccatatcgtgcatcagtggctcgcttcccctcgggctctcctttgattgcacactcatgtgcggcacaatctatccactgtaaataacctcctggctctgctcggtattacgttagatcttggattaatcgaagctaagatgggaaactccgtactgagaagcgtcatcaagtttcgcacggcaggctcccactcgtcagaagacaatgccaccaccatcactcgaacattgacgacatcgtattctcctagatactcatctgggaatggctcaagaaaattttgatgatggaaggtgatattttccggcaaggcatccttgtggggaaacatgacgtctgagaggtcaaacccgtcaagctgacaagtacttgggagggcagctgcgagctcacgtaaccagatccttggagaatagtgttagggctttcttctcttaatggagttgttactcacccagttcctgtaccgacatctgcaatgcgcatacgatcatgttgtttgatggctggatgaaggagatacccaatattggcttgccaggctttatattgcatattcagtctgtattccatgttaatattaccagagggttgaattgctgctgagttttccacctgtcgcgttcggctatgttcctaaccagtaaatattcaccgtgagattggacttggtcggacatttccaaatgtcgaaagcgatatgatcttcaaaaggttgaatcagattaaatccgagcaaagttccagcagtataagctcttttataatggcgagatttagctttgaagggcggatttgggggcttggtggcggtagtaagcataaatgttagtcaggcctccgatccaggcctcccatctaggcctcccatttcggccccatgcaggattctattaagttatagacctcgaacggtctctgtctctgcaacagccaactagctgagagtatgttcagtcagcggtggtagatctcgtattttttggagtacttatatgacccatcaaaccaacggcacctctctagggcccgagcgattgagctgagtggttggggctataacttgaactcacatgtgcggaggtgatagacgtcatcctggtcatcaattgccattttcaccataaagttcacgactcggtgtgtattatcaattctagcgcccaatcgcgatgagggagcagcaatgcccaccccggaggtgtatggggtgcaccttactccactactaattactgtatgtcaatgtagcagggccttgggggttgatattattactactattgctgtgtgcctcaaatttatacccaagcataaaaagtggaggtctgtgaatagtcgcgccgcgaagccgaggcctatatgatcttctgatatcctgtaaatatcacaaaatgaggacttatatgcagttgtggtgactagtatcaatcattgactcgccctttcgattcgaaaataatcattgggcacttcccctcgattcgtctagacgctattgtgctcgttccagctttgtttgccccatcctctttgcctgtcttcttgtaaaaaactaaccttacggaatattattcaatgcattcaagacactttagtgtacttctcatctatctctttcgatcaagactccatacctaaccttggcgccgatcactccacctgactaagagccgatcttggcgcgccgaaatggatcaaagtcgcgtccctcaacaggacgccgaccgcgtggccaccatgtacggcgaactcggcaacaaattggtacgtgggctatagattcatcccgctcttgggcatttatcatctcaacacagaccgaccgtataatatcaaaacaagagaaaacgaaacccgctgaccaacaactcacgcgcaataggtccaacacgccaaacgcacccaatccctcgcccacctacccccataccaaaccgaaatcgtgcgcgcagtaacccgggaagtccgcgatctcgaccgcgatgtcatccgtctcctagcacccttcgagggcgcgttcaacccctcagccgacccagccatcgcctgcgcgctcctcgtcgaccacctgtgcatgcgccggaacaagcgctgcctgcttgcgtatcaccgcgtgcgcacagacaagctcgaggagctttgctggacgggcgtggatatcctcgagcagcagcagccgtccgatgacagcgcggcgccgcagcacacggctctcggggcgaacgggcatagctcgctgagtcccgaggaggaggagtatttccgccagtacggggatatgcttgctgcgtataagggccagtggacggatgttgatttgacggggacgctggagccgccgaagcatttgtttattgatgtgcgggtgttgaaggatgctggtgagattcagacggaatatgggtatgtttcttttcttttgtctcctgcattttctgggtgttcggtggctaatttgggtttagggtgatcaacttgaccaagaacagtcagctgtatgttcgtcaaggtgatgtggagcgtctgattgcgcagggtttcctggagcggttgacttgaatgtgagccggaactacctggctgcttcgggttttatatgagtacaagaattacatgagcaaaagaaatatgagttagcgttggatatctacagtggttttatgacgggaccatggactttgagatacccccgccgttaagacatcggccaaaatgaagattttctgcattgccatagtgcgagtctaattatgtatgaccgttggtttgatcaatagcttttttactcgaattactctctagggctagattggcctatggtaaaagaccaattgaagcgatgaccataactagttatctcgttggctggcgttatgcaaggaaacaaggctgcggctgcatgtcaatgccgatcatgcggcgcatagcactgtgttccgaccacggagctgtagcatgttgtatactatttctattacgtatgattatcgaaggtctagttagtctagagttagcgcaattgaagagacaacctattatatctctcgaagacccgttcccctccgctctcattaatacggtgaaatgctacggcgtactccgtagaaatacccattagtagtaccatttagcccacgatcgacccgaccgcacttcccctctatgcttaatagaatagatcaatctagtcgaccccactaatttaaacctctatcttagcctgtaatgcatggaactagtagtcattgtaggccgatgtactccgtgatagattaattaatcaagccttgcaacctagaaaactaggcacctcaaaaagtgggggtttgaattggtaacctggggtgtcaaccaaagggttgacattgtagtctttttagtagaacgttggtaggttcttcctgattgatctaaaagaaaatgggtaagtaagagaatggtgaaagagctatagcaactgagaggtaactgagagcaaactctctatcctaggccttaccctaatttagtcagtcccatcatttactctcactgacgagttctaatcctatacatcgcaccgtccttcttctctcactcaccatgccgaatgtcctcacttccatttctgtctcgacgggctcatccatgagtacaacttcagtgatacagtttgacaacctgtctgcctttaaagctcacgtcctctcctccctacaccaagtcgaaagctatcacgactttttatttaccgacgtgcctgaatcctgggggggcggccgtgttccagcgtattgacgaaaagatcccttctcggtaagtcaaagaccttctgcatctaattttccttgactcttacccaatatactaggaaaacccacaatacaagggaccgtactctacgggtcaaagtcataccgacagaggtacaaaattgtatccagcactggctagtgcagcagatgatcgactggctcttgaatcataacataacgcaatatgaacaaccactcttacgtgtggcagttggaacaagtaagtaccttacaactcacttacctgcacaggaactctagaaaagaacccaacttctttttccgagtcgaggttcatatcatgccagctattgcggtagagtgtggctggagcgagtcgattacacgactttataataatatgaacctgttactaatgggtggtgatggctctattagggttgtcattatcgtcaagtggagaaagctgcaaggaggtgtctcggggactgtcgagctctttaacagagaccgaaacgatatgcccagatgtgaacaaagcgaagtatgtccggatttctgattaaatatcacatacttattacctggaatctgtgcagactatcttcccccgccctgccactggaaataatcaacggctagggattcgacgacgtgatatctttgggccggcgctattagatgacaacagcgggaatgatatcctctacctggatgtcgagcgactgcgtggttatgccgccgaatcccttcacttcatgaaccttgttccggcataaatatcttcttggttgattgtatgcaactaattgattcctttgtcttgatacattgctgctactatgactactctctctatagtaactgtaaggcgatttactacaacaatacatgtagctactattgagagcataggtgaaacttgagagaccctaatatatcatgtgatgatatcttatcttatcttatccgcttaggtcagccgagtgttggctgtttgcgcacgggcctaccgcctcccactatcttcatctgtattagtccggatccggtttagcgcgcctattaagagataagggacgtttagtcaaaaaaccttggaactccgatacttcggatcttttctatctggtctgttgctaattcagatttgtgttgataggtaacttcctttcacttctatataattcactgagccccccttgcaatgttcatctcggttgcgtcatctgtttgtccaaacggcccaatgcgttaagtggccccgtttaacttccgaatcctaaattttcgacgcacttggttggacagcaattgcgcgagataccatggcggttttgcagcctcgtggccgtcgcgactctcgtgcatcagcgctatcacgcaatctgatgtttgaccgcgacatccagggtaacgccccatcagaaacgttggtggaacatgcaaatccaggtagcccgcccggtccaatgggagcggaatcatccagctacaatggatcaacgacaagaacaccaaaccgttcattttaccaccggtccttcaatagcaatatgggtgggtcattgtggtgcatacatagtgcacggctagagatacggcgcaatttttactgaccattcgacctatcacagatccggctcattatgcttcaggtggtctccgtgaccagactgcggaactcgctacctatggcctttcgctgaataagaattccctcttgagggacggctccggcttacctcccacccttgatatattccacggcagacgggattctgcaagttactcccaggacgaagctgcaaactctcaatccgcagcgggggaggcgttattggagccagggtatccctcagttgaccctgcttcggcttcaggcccttcggccttgacagagatgattcgccgtcctttgacggatacggaggaggaccaggccacacaacccgggaccgatgatatctccttccccccaccgatgatctatgcggaacccgaacgagacaatgaaagcacctcgttattatctaaatcacgatccaaatctatacaaaactatggaagtgcaagtgacgctgagaatcaaagggcggctgcacaacgatctccaaacttaataacgaaaggaatttcatccgtcacccattatactcggatcttgtcgaacccaaaggcatgggatgggcgagccatatggaaagatgctgtggtataccccgcaagtctggttcctgccgtattactgggtctactgctcaacattcttgatgctttatcctatggaatgatcttgttccctctgggagaacccctgttcgctcacctgggaactgacggtatctcgatgttctatgtcagtaccattatatcccaagtggtattctcctgtggaggctcgatcttcaaaggaggaataggaagtgagatgattgaagtagtacccttcttccaccagatggctttcaccatcatgaattcagtcggcaaggacaacccgaaatcagtgattgcaacgaccattctagccttttcggtcagttcggttctcaccggcttggtgttcttcttaatgggtgtatgtgggctgggctcactcattggcttctttccccgtcatattctcatcgggtgcatcggtggtgtgggctactttcttctacagactggaatggaggtttcagcccggctccccgggtctctcgagtacaacctccccacgattcagaaacttttcactctcgatactttccctctttggatgatacccctcttccttgccattggacttcttgttctcaaacgatttgttcgctcgaacttccttgtcggcggatacttcattgccgttgctgcagtgttctacattgtcatcttaagcgctaggatttctatgggcgctctgcgccacaatggatgggtctttgctgccccgtcttcgaacaacccgtggtatcatttctattctctctatggtgagtcaattggttgtaattcttctggcattccatgctaattcattccagatctctcggcggtcaattggactgcctttggtgagacaattccggccatgttcgctttgacattctttggtgtgcttcatgtgcccatcaacgtacctgctctcggcatatccaccggcgaagacaatctcaacgttgacagagagctcatggcacatggcgtgacgaatgcactttcaggattcgcaggaagcattcaggtatgtgaccccatcgctagagctgtggttaatgtgctaacggaagcagaactatcttgtttataccaacagtcttctcttcattgcaagtggcgggtcatctcggttggctggtctgatgttggccgcagccactgcagggattatggtcattggcccagtaataatcggctttattcctattatggtcgttggtgccttgatcttcttgttgggcattgagcttttgcaggaggcattggtggacacatggggaaaactcacccggcttgaatatctaaccgttgtcattatcgttgtcactatgggcgcttgggacttcgtggtcggaatcttcattgggatcattttggcctgtgtgaactttgtggtccaaacgtctcggaaatctgccattcgagcaacattctcgggtgaaatttctgggtcaacggtccgacgtcctcctatccaacaggagttcctacgcgaagctgggcagcagaccctgattatcaagcttggtggatatctcttttttggaaccatcgtgaatgtcgagaacaccatgcgtggcctgatcgaggaggaagctttcgaccgtcgtcccattcgattcatcattctcgattttactcgagtctacggaatcgacttctcggccgcagaagcattcacccgcatcaaccgcgttcttcaaaagcgcaacgtacaaacggccatatccggcttggatgtcgaaagtgacgtaggaaggtccctacaaaatgtaggacttttcgagccagaatctggcgtccctatcttcgaagacctgaactcagcccttgagttctgcgagaacaactacctgaaagtcttctacaaccgccagcaagcactttccacacccaccgattcaactgcaaactccgagctcctccaaatccccgcctcagtccccgtgccctcaggacccaaacctatcaccctaaccgacaacattgtcagctcaccccgccgccagcacctacagcgcgtggcgacctcaaccatccaagcccacgaaacaacaatgatggcctcccccgcctggtccgccatgcgccaaccactcccactcctcctccaaaccttccaaggcctctcaaccgaaaacgaagacttttggttccccgcctgcgcctacttctcctgcgaatgctaccccgccggcgcagtcctgtaccacgaaggcgacgccccgcgcgccttctacctcctcgagtctggcatgctgcgcgctggctacgacctcccacagggccgctacttcgagctcattgtcgctggtagaccgtgcggcgaactgcctttcttcagtgatacacgccgcacggcgacagtcaaggccgagcgcgattgtgtggcttggtgtttaacgggggcgcagtggaaggtgctacaggagaaagagccgcgcattgctcgtgaactgttgacggttagcttgaagttgacgactgagcgcatggatagtatcacctcgtatgttttgacgatggcggcttgattttctttttagttggcttgttcgttgtttgcatctagcttggtggttatctgagcgagttgttgggcctcgtttttaatgttgatattcccatattccccgactctttggtttacatatgcattcgtatatagcagctggagcatgcatgcatatcgacctcgtgatgtttttatgatcgttgtatgtagcagaacttcgccttgcacgcatgtgggtagttgtccttgtataattgaagatacctgattgattgcgacaagcagctgaaacttttctgaaaagccttgggcctattcaatgaatcgaaaaagataatgcaggagatgtatgagttctttgagtttttcacagatgatgtccgaaagaagaagggggggtcaagtatgagaaggcgtctagttctgtgatgcatcatgttaaatttctgtctttcggccgaaaatcagtctcttacaatataatttggggtgtttcctttgttaatgctattcttctttatttcttgctgtagatccaatatctcaattccatcccggcgcgctacggtgcacgtgatccggcgttcctgacacgcgtgggcgcgtccctgattgcctcattctagtttcacacttggatgtgactctcttggagatttttcaatcaacagcccagtctttaatcgcatattttatctacaaatttggctatggcagctgaaaatggagactcaaagctcttcgagcagtgttgcttctgtattgtatgctccaaggatctttcgaacgaatccgcagaacaggtacgtgttttcctgccactaggacagcctgaactagactgacaaaataaactcgtctagctagccactctaatcgagcaaaatggcggcgagcctctgattgtccaacccggtgccgaggtccccgatgtggccaagttcagccatatgatctctacaactattgacttccaagcatacggtactgcctgcgatgcgttgatcccagtggtgaagccacagtgggtgaataactcattgacgaagcggaaactggccaacccccgccaatacagcccagacccgcgtctgttcatgaacgatgtggtggttacctgcggcgacatacccgagggagacaaggatgcaatcatagggggtgtagttgcgaagggtggattgtattctccaagaatttctcaacaggttacacatttggtggacctcacggccgactccgacaaggcgcgcattttgcaggcgaagagattaaacgtgaagattgtactaccacactggtaagtttcatggtacaacagccagtgaccctcgctgactgagaataggtttgacgactgccttaaacttggtcgacgaatcgacgaacgtccatatacacttccagacccagagattttgcgcgcgggtcctgatactccaatccgatggcaagataataaggacttggtcggtgcgtcgacaacaaatccttctaagttgcctacgcctagttcggcgcatcaatcaggccaacgcagtgtctttgaaggaaaatccattatgttgtctccggatcttgcaatcggctcccacttgcaggagtcaatccaagccgtcctcgaacaaggcggtgccaaagtgacatcaaatattgatgtagcagacatgttaatttgtcgttaccgggaaggattttcatatcgcacggcatcgcgactgaacatcgacgttgggaatctcgcatggctctaccacctcatgaccttcaacacatatacttcacccctcagacgactactacactacccggtctctcgcactggaatccctggatttgagggtttgaaaatcagtttgtccaattatgttggcgaagcaagaatttacttggagaatttgatcgcagcagcaggtgcagaatgtaccaaaactttaaagcaagagaacacccatctgatcacggcacacggaatgagtgagaaatgcaatgccgcgaaggaatggggcctcgaagttgtcaaccacttgtggctggaggacagttatgcaaaatggaagctccagccggcatcaaacccgcgctacagccacttccctctgcgaaccaatctcggagaagtcgcaggccagacgccgctcgaccgccatgttttggagcaggtatttttctcgtccgaggagaatattgctcatagcccacggcgcgcaatgcagagcaagaaccaaaatatggtttcggtacagcctcccgctgagaagaaaaggaagattgatgaggatgccccggaaacttcgctcgggactccgcagggtaatgggaagtcacgccgacctattcaaacacccgcacgaactcgagtcatgtccgaaggcaaagaaaatgagacaccatcgtcgaccagtagccgcaagtcaaaagaggcggcagctgcccggcttcatgagtatgtcccggaccttgcgttgtacgaaaaggaaaggaaacgcgtggggggtgttatctacggtggcaggcgaaagtcagatgaaggccgggttcaggagaacaaaaagcgtgcctcacctgaagctgaggatgagagcgatggcgagcaagcagtggagactaaacgacagaaaaagtcacggccaccaattgctatgcacctcttgattactggatatcagagatgggttggtaagggaaacgagaagaaagaagatgcagacaaggttcgtttaacgactgaagttatgaaaatattggcttaggatctatctattgacactttcacagcgagggcttcgagatctcggtatcatggtggtccaagatgcccgacgatgcactcatttggccgcaccgtcgatcttgcgaactaccaaattcgttaatgcactcgcgtatgcgccgatgatccttagcacaaagttcattgacagttgcctaaaggaggagaaactgcttgacccttccgatttccctctagaggataaagaagccgagaagaagtacagttttgacctgtcttctgtcacaaaaaacgcaaagaagaacaagaataaaatgctgcaaggctatcgcatctactgcgtcgaggacattcgaggcggatttgatgccttcaaatctattgttgaaacaaacggaggagagtgcatgctttaccgtggccgtctggctataaagaaccattctcggcgggaggagagcgacgaggaaagcgaatcggaagatggaagccctgtccgcaaggatgtcttcctcctcagcagtactggagctaatcacgctcgagtctggcctcgattccgccaactggcggtcgatatcaagaagactccacggattgtccgggttgactggctcctggacatggccatgtcgcagcagacacgtgctgccgacgaatacgagctgaccgatgagatgatcgagacaatggaccagtagaccgataccaaggtattgagtcgacactctcatccacttagggctttcaacctaagaacatggattctgtgtataagtttggagtatcggcgacgtgattaacatgtcttttggcctgcacataggaagcgctttgtttatgtcacgaatagccacgatttatctcatagagaaatcccagcatctcatcttgagctgttcaaaagaacttgacaccctcctggccctcagcgccaaaaatctgcgccctgcccctcttaaccaggacattcagcgagcgcaacatgacatcagtatccatgccatggaactctgtagacgcgaatcagcacagtccgtagacattatcattcacaaccgaagacacaatctcaccctgcgacattgctccctccccatgaataagctcatacacggtcagaaccgaccccctctgcccagtgccctcaacccactcgaccaacacatccgcccactcctcaggcctcctccaccaaatccacgcaacagccttcggcccttgcccagcaccatttcccaacccccctaaagacgacgcgcctcctgcatccgagatccactccgctcgccgcccaccgccgccttcctcttcgctcttagtcatccagtcgatgaccgcgcgggcctcgcgcagatcaaggcgcttgcgcagggccgtattgtggaatagcggtgtttcgacggcgtcgattagggagagacggtattggcgatgatgccggcaccaggattggatcagagaggaccatttctcgagctgcgagtggcgggttgttgtgtttggttgcggggtgaagaagggggggaagttgtaggttggtgggaaggggaagggaggtgttgttgtcatattggaagggattaaagagtgaagattgaagagcagatagctaaatggaccaaatagaagtagaaaagttaagacgagtagaatgtcgagaacaagaagagacaagacggtcgagagactccaagctgtggagtaaaaggtggggcccgggggattttctcaatttcgacttcggcctttggatttctctcgactgtcccctctgctcttcacaatggccacccaaaatccgcctgcaaagcgcaccaagcgcgaagagtaccgtcgcaatgtacaggcccagcaggaatccaccgatggctccgtcatcaagatgccgcagaagaaattcttccgccagcgcgcgcatgcgaatccattctccgaccaccggctagaatagtatgtatcctatctgcctgtttcacgttaaactgctgctacggggtttcacgggattctcgagctccattggcgacaattccttcgcatccgatcgaagactgatagctaactcacaccctaatagtcccctcagccccgcgcacatggactggtcatcccatttccctgcatttgtcgatccggatacatccaaaacgaacctcagcggagggcggaagttgaccaaggaggtcgaagtcgtggatatcggatgtggattcggcgggctgatcgttggcctggcaccattgatgccagataccctgatggttggtaagtacagcgcagcgatattccaactcatatatacacccggccgaatgagcaccgcaaaactaaccacaaaaccacaggcatggaaatccgcacctcagtgctggaatacgtcacctctcgcatccacgccctgcgcagccaacaacaacgcctaaagaacaaagccgcgaacccatcatcaaccgaaccccaagacgcctcaacacaacccgaaaacaccgaatcagccccggccccaaccccagccaacgacgatgaaatcggcacggagaaaatcttcccaggaaacttcgaaaacatcgccgcaatccgcagcaacacaatgaagttcctcccaaacttcttcggccaccaccaactctccaagatcttcatctgcttcccggacccgcacttcaaggcccgtaagcacaaggcccgtattatctccgagtctctaaatgccgagtatgcatttgtcctgcggcctggcggtctgctgtacaccattaccgatgtcgaggagtatcaccactgggtcctgcggcatttcctgaataatgagcagcaggagggtgaaccggcccctgctccgagtagtaaggatctgtttgagcgggttcctgatgaggagcttgctcttgatccttgtgtgcgggttatgaaatttgagacagaggagtcgaagaaagttacgagaaataagggaaacaagtatgttgctgttttcaggcgcaaggctgatcctgagtggcctgtttgaaaaggagtggagggaactagatacctaattagagaggagagaggagaatatggcaagttaggaatcattggatataaatgatatgacgataagagggggaggtgttttggggcgtttttccctcattctaactgcatgcatggccaatatcatacttcaacatcgctcatcgctcatcgctggcaatcttcgcttgctaacaaaaacaaaacataagaacaaacacccgaaatgaacccgaaaaggggttgtagacgtgcagacaaatcaaaaatcaagttatgcaacaatcaaacaccgacatcatgcgataaaagcagtaatttcgctaaaacatggtggccgtagcccggcaactaaatggtgcaaaagtctagcacatcccaggcgccttgagacggataccctcacatctctcacagatagccagttggaccggaccaccgatgatgcggcccttagctgtccgcttgggctcgccttcacgaacgaagaatcggccctccgaaccgaaaccctcgccacactcgtgacaattgaagcagctctcgtgccactggccaccgattgcgctgacgacaacatcgtccatgacctgttttttgcagcccagacaacgtggtgcggtacggcgcgagtggcagttgagacaccacgcgaagccatctttctcgacaaagggagtttgggaatcgaagggctatatgagaagaaatagtcagttatcttgagggcgaacgtattagaagggaatccacacatacatcaccgcactctgcgcagaagaagtggccgacatgccattcggcaccacatgccactaccacttctccttcaataggggtcttgcagctcttgcaacggggactgaacatctcgtggaaatctagatggcagtagaaacgtggcacgcgagcttcaatgtcactagaatcggtttttgataatctctcggctctgttggattccggttctgaatagaaagccacgcattcgaggggtgtgctgcagtggaaacaggtaaagcactccgggtggaatcgacatccgccagcggtcacaatttttccggaaatggaaagcgtacaacgctcacagcttgcagtggggacaccagttcgtgtatagggcgagtaccaacggctctgcgattgcggttttttccccgtcgggtggggtctagccgcttgcttggaagaagcctcgatctcggagatagtgggtactttgatgtccgggatatttatcacgggaactggagtcggctcagagacttcaatggtcggtggtgctatttcaatcacgggtagggttggacgatcgggcttcggctgatcaactggtttccaagttttgtcgaagctcacgattgggcgtcccactcgatcactgacagctgaaggcattggtaacttttcgctgcggtcccctcgttttttgctggtagctgcgcggatctcgtcactgcgtctctctctcccatcctggatggagacaagctcatccttttcttcggggggaggagtcggagtagcacgctcgtttctagcgtagccggccttgtgtgactcagtgggagaaggagtagggctttcgtttcgagtgtagccagcaacttgtgactgagtgggagaaggagtagcgctttcgtttcgagtgtagccggcattacgcggcttggtgggagtgtccttgggggtttcaaaccgcgaaatcttatccatcatagggctgctgtgaactctattctgcaaccaaggcaatggcctaggaatacggcctagggcgttgcgcggtttgtttttcattgctgacgagtcagacttggaaaattccgacttcggttcgggttccttctttggttcgggtttcttctttgtctcaatgggctcttcgtatatttgttctttagggttcttgaggattcctttaaatgaatcgctgctgacagtttgcggttcgggagcaacagactcctcgagttcgggtagtttgaagttgactttgagattcttctttgagggaccagccagagatgatcgtttgcgcagtgactccgggctagagttaccatcagaagagatacttgagccagtggactggctgaatttattggtcaaggggtcatattctcgcgaaccatttttaacagggctctggctgcccttgttggcatcaggattttggtatggcgcataagggtttttgaaagcttgacccggattctggtgcatccaaactagctgcgtggcctcatcctgggccgcttggtgaagtccaacatcgtcctcgatatccattttctgcaaggcctctcgtagtgcccgtgcctcttccttttcgtgtcgtcgttgcccattttcacgataggacagagcgggagatgccggtattgatatggtacgtgcgtgaatttgtgctggaaagacgttcttccggatcgagtgcgttcgtggctcctgagctaaaggacgacccattgcgccggcggacgcttgggaattcgcccggcgatgggacattgcgctgcctgaccgtcgatcttcaacgtcatgctcgaccggggtacgcatggagaatgccgaggatgcccttggaggaaggttatcagactgatcgctaactgcggctgctttgcctgggtatggacgagatcctgtcggacgggcaggacgattcgctcgcaaatctttcaagtatgttgctgttgactcacatcagctccgagccgtccgacaccgaagagttacttacagacttgatcgttggacatgaaggatgggccaggaggtgagacttttctctgagtgggatgtttatgcatcatggaattgcaaggatcagggatccaggagaagatatatggataagtacagaaaagagggacctagatgaactaagatgagaagagtctagttggatctacaattgacggtctgagctggctagcgtcattgggctggtctcccctccaaacaaaccccttgggcccgtcgcgaggcaacggatgactcagcatgggtatctgccgataagggcttgtttttatgaagccctataagcccttttggacaacaagtgtggataatgccaatgcctggcactcgagacctttccctttccaggttgatgctcacctcttgccgctttttgatcactaagtaaaactgagctgaatattctgacttgatcacgagccactattgctaagcaaagcgaaccaataaatcatatccttgtgtgtacatgtcacgtgacccttctctaggtgaactatcatcggctaacttgggcagaaagacccaaccggcagaataaatatagactaggcctaatcgggctagacgatgatttctatttcatgtctgtcatctgtcgacgagtttcatctgcaacataattatctcactcaatgggatctatatcctaaacacggccagtatgccgtggaactacttgcggttatttactcggaaaatgttcgaatagggaggaggtgtgagaataatgacactagcgccagcgttaagtagaggcttattcctgatgaacgcggcatgtccttcctctactattccggatgtcgaattgggtgataatgggatgagacacatttggaacggatcgttgaggatctccgtggccacatagaaatgggccacagtccatctccaatcctgtcattccgggtgagctaggcaattaaacggatgacgataaggtacatttaaatatataaaagttaatactcagaatcttagccctatggatacatggctctattcaagctcatccattattgaaaccttgggatgtcatacttggctgtggagtatcttgtgccgagaagccggtgcggagagaatcgagttgggcagatgtgggggaatttttagtcacgagaattgcatagcttcggacgcgagtagctgtatattagcttccttcattggtctgatagagccgaatctaaataataaaccaggtccgtcctggggatctcgcctctatacgaaccatgttccaaggtaggattcggcattcagtccgatagtccgatgactccaattattttattaccaatgataaactgatcgaaatctagtccctttttctcttagcgtgctcatttaactcttttgcttccttttacaaaaatctctatgtcgtgacgaaaacggcaaccggtttcggtctttaaggagctcgtgatctcggaaaataacaagccgggcttgtatctgagctatcatcatggcggataatgtgcccatcgatatcatccgttcccatgaggacgaagtggaccgtgagagcgcagaacagaaagagacgttgtatccactgtcggcaccattggaagtcgacgaagatgaaaaatataagcacgatgtggccccggacggtggctatggctgggtctgtatcgcctgtgttttctggatcaatgcgcatacctggggtatcaatagcgtgagtcattagtcttcaccttcaaatttgcaccttcgtcttactaacaggtctaatatccagagctacggagtcttcctgagctattacctctcaaacgatgtattccccaacacatctgccctatcgtacgctttcacgggcggcttgagtatctcctgtgccctcctggtggccccagtagccacccatatgatccacaaattgggtgtacgatttgtcctcaacctgggcatcttcttcgaaaccctctctctaataggggcctcatttgcaacccagaaatggcatatcttcctcagccaaggcgtctgtttcggctggggaatgggcttcctcttcgtgggcagtgtcggcatcaccccgcaatggttcgacaagcaccgcggcgtagcgatgggcatcaacgccgccggatctggtctcggtggcctgatgtactccctcgccgtgggcgccattattccgcgctacgggctagcctgggcgttccgcattttgggtatcatttcgtgcgtcgtgaatctggtctgttgtaacttgctccgggaccgcaacaaggctgtcggcagtagatttacggctttccatctgcccctcctgcgtcgcccggagtttttgctcttcctcgggtggggggtgttcagtatgctcggatatgtggcgctgctgttcagcgttgccaactttgctctctctgtcggtctctcgtcacaccaggggagtattgtctcggcgctgctcaacctgggtcagggtctcggtcgtccgtttgttggcatgttcagtgacagacttggccgtattaatattgccactttcctcactttcctctgcggtctgttctgtctcgtcatctggacttctgctgacagtatgggtgtcgtatgcttcttcgccgttttggttggcactgtcgcaggcacgtattgggctactgtttctcctgtcctggcggagattattggtatcagggatctcccttctggcttaagcattacctggctcacgcttgttgttccttgcactgtctccgagcctatcgcccttcagctccgcagccatggtattggtggcgagacttcatatctccacgttcagatatttactggattcatgtatattggtgcttccatgtgtctgtgggttgtccgcggttggaaggtcggcgagctggagcgtgctctggcaagccgtgattccgtcgtccagtctggcccattgactggagtcaacggcggaaatgagaagcaaaactgccctgcgactatttccccggccttggaggccactgacacaaacattccgttatgggccccggtcagcttggtacgcagaatgatctcgttgaaaaaggtttaaataactgcgtagcgcagagtacatacatgtcacacaaatgaacatacaaaaatagacaatcgtctgtcattcatttgatttgaacgccgttttaatactaacctacatggatgtagcttttgtttcatgcctccgtaaccaagatccggacccttctcttgccggcgccacgaccttcttccttgacggagctgacattgacacgaaccttttggaaaagttcaacagtcacactgcgttccttctccgggtgacccttctcctccacacaaagggtatattcctcgctgtcaaactccgtagtgcggtgaggagctagctcccgtctctctgcgacagaacgagctccagattcaccgggtaggacgaagtcctccagacgaacgacaccttcaatgccgaagcggggaacaaagatgacaacaccgttctcgaacacacgcatcacgtatccttcttcttcaatacccgcatcaacaccgtcggcggccatcttctctccacgggccttgagagcctggcccacgtagtattcaatactagcgcggccagcatgctgtgcattgcggtgacggacgttgatgttccggcagatgtcttctagcttgttgcgggtgctgacaccctcgatgactgcgtgtccatcctcaccttcatacccaatggcagaagccaattgccggtgaaccatcagatcggcatatcgtcgaatgggtgaagtaaagtgggtgtaaatgggcgaggcgagaccgtagtgacggaattcggattcgccaaaggcccccgcgcagaaatactcggcagaggtcatgcaacgggtcgccaagatacggaccagggtgttgaagaatgggttcttaggatcgatgcaacgatccaaagaatcagccagagctcgtgagctggaaacatccagctccatgtctcgcttcttcgagagttgtttttgaaggtcctcgaaattttgaggcgggggagtggcgtgccgacgtagcaaggccgtctgaggaaaggactcatagaccttcgaggcaacagtgatattggcgagaagcatgaactcttcgaccaagctattagtgtcaagcatagccttggtcttgacgtccgtcaaaggatcgcccacttcatcgccttcactctcaatgcggacttctggggaagcgaggttcaaggcaccagcgtccatacgcttctgacggagaaccttggagaatttcaagagagtgcgcatgctttcggtcagctcgtcctgctgtgatttgtcgtcaatgcgtaactgagcttgttcgtaactgaatgcttcccgggagcgaatgaccgacttgctgaaatttgaagacactatctcggcatcaggtgtcatctcccactgaaccgagaacgcatatcgttcaacatagggcttgagagagcaaatatctgtaccaagaaggtgcgggagcatgtcgatacgcttatcgactaggtaaacagtggttccgcgaatactggcctcgagatccattgggttgttgggtttgacgaaatgtgacacatctgcaatgtggacaccaacctcaaagtttccatttggcagaagacgcgcgtgaagtgcgtcgtcaatatcctgacagccgggtggatcgatactgcaaataagcaagtctcgaagatctttccggccggtccagcctttatcctccttcgagacaggaaccttccaattatgaccttcagatggaaggcagtccaacacagatttcgggaacggcttatactgcacgtcgtattcaagcaataaagcctcggtttcggcacccttggtttcgagctctcccagagaccgaatgaagtgaccggtaggatatctcgaatcgcggtcccaagaatcgatggtgacaagaatacgctgaccgagaatatcgctagcctgtcttgtgcgtactctgatcttcgggatacgcttgtccatgggtagtaagaaaacgttttgttgccgtctaccagaggcctgtgagccagtagaattcgagtcaacgtgaccaacgtattgacgccagctgcgcttgataacaccaacaaccttggcagtaggctgtggcttgccatccgagttcttgccatgggcctttttgacttcttcctggagggctttgcgttctctgtccgttaccacagcatcggtctcctcagtatcagggttatcattacgggtcacggcttcctcatccacaatcttagtcgaagggctcttccactggtcctgtggtagtacttcgaccacgacagaatcacccgcaatagcgcggttactattatcacggcccaaaatgagaagaggtttatcgaaagccgcggtcttgacggaggcttccaggtagttgtaaggagaaacattgaacactccctggtgcaatgtcccggctcgcagaccagtcgtgagctttgacattgtgaaatattcagggtagaaaaactccccgcgggttgtctctttggcatctcgcgcatcctttgactcgctgatcatatccagcaacatttcggacccctctaagccggagacatagtcggatagcgacaaggccgccacattttcttccttgcatttccgaagattctctttgtcatcagttatgacaacaattgccggtatcgccttctctttcttccctttttttgctgattgttgcaggtgagaactgtaccaggttgctaccatgcgcacggcgcgatcgttcctgtcgttgattgtttcctccgggcctctgcgaacatgagtctctcggcgaaactcgttgaaaaagaggtagaagcgcttttcgtctgacttgacgagggccagaagacggttgtaaagtggtattgatcggtttctcaattcctcgaggacagtctggaggacaatcacatcgtaaaaggccccagtgtgctcaaaaagatccattccattaagcagcgcatttgtatcgggaacaatgtagtggcctcgggggaatgccgttgtgccggcggggcgatcagataggatgaacggcgcaactgtttcgattagcaacttgcttgaccattaccgtaataatttccttactttttccattggcatcagccggcgcaatcgtcgggcattgtgagcagagcttagaagagcaaggaatatcttctctcaaatagagctcgcggacaatcttttgcacctttccacttttcgtagacctaacgaagaccttgctggtaacatttgcggcctgcgggttggcagacaagtctcttcgtaaactcttcattgcgacggtaagattccactgtctagcagtggctgaatctgtcaaaacctgtgtgtcttgtgaaagatccgaggtgagagccttggcgagaagaaaggttatcgctgatcatcgcgataactagctgagtcagcacacgggctcgtcactttggggtcgaaagatgccatttgatcgctacaggaaaggtattttgtcatagagaacttggttttggattctactctagatctctttcagattctgaacttttatcactatggttttagcggtatgtgctgaccatccatcggacgtgagccacctagctaacaacttgctttgatttaggccgtggggcagctatgttcgactagcaacataacttcgaacctagctcaatgcaaggtgttggttcgaaaggctgctgcagcaggtgccaaggtgatattatactattccacagccaactttccgatagacagctcatatatgttaggtgctgtttcttccagaggcatcagactatatcgcatcctcggcagagcaatcctactccctcgcccagtctgaagagagagctagctttgtgtcgtccttacagaaagatgccgaggaacagaaaatccacatcaatgttggaattcatgaagtagcctctgaaaccaggctcaagaatttattgatttggatcgatgataagggaatcatctcccaaaagtaccagaaggtccatctttttgacgttgatatcaaagacggacctgtactcaaggagagcgcgtaagccttttttcagatccaatagttgacttatcaatcgctaaccttccatcaggagcgtccagcccggacaacaactccctaggccatttgatacacctgtagggcgtgttggtctgagcatttgttttgatgtaagtaatggacgttggaatcacatcggacattaacttcttactcatgctggatcatttagttgcgttttccagagatcagcctggcattgaggcggcagaatgctgaaatcatcacatatccatcggcattcactgttccgacaggaaaggctcattgggagcccttgctacgagcaagagctattgagacccagtcatatgtgattgcagctgcgcaggcaggcccccataatgagaagagacgaagctatggtcattctattatcatcaacccgtggggtgaggtggtggcaaacctgggggatgagtatcaggaaccacaaatcgcgaccgccgatattgatctcgatcttgtggcgaagattcggcgtgaaatgccattgcttcggagaactgatctatatccagaaatttgagagccctattgtgaacagcgaggaggcaaatgccagtggccctctttctccagtacatcctgcaaatagcctatcagatatcacttccatacagtttaacttaaatcattttcataatgtgcttagtgcgaattataaccatttttctttgcgaccggagcacctataagcaacatgacggaaagaaacttcgaaaagtgtaaagtgatacaacaaggaacgaacgaaaatagatgagcatgcagaaaaaacctgtctaagaacgagaccggaacatcatatctgccgtcgcaagtagtacagacataaatcgaaatagtccctctttgatctctatgtacaacgtacaacttggcgtttattccttgaccttatcagggtcctcgaggataccctcagcttccagtctccgacgagcctcttcgagagcccatgtttgtatactatcgcaattgtcagtattccagttgcgcgacgagtataaacgccaatattaaggcactaggtcgggatacaggttatacgtacgaagtatcaggcttgaaaacgtatgcaacaccggcgaccaaaatgcttccaatgaatccgtagtaccaaatgttctcccagccttccttcacgtacttctggccgggcttgacaccgaacagccacccggtgggaggatcatagtgatcaccgtgatccgcggcacggatactggatcgagttgagaatgcctgggtcttttgagactgacgaagcaggcaacgcgcccggaggatgtgcgacaatggtcgggcactcatcttgaagatgggatgaaggagggttgatgccgaaacactggcgtgcaaggagattggtgagagtcacgagggacagaatatccttgctaaattcaggtggtaaggacggtctcaattgatatgttgcctcttgcggtagagtggaggggggggcttcggcgggttgatgttgaagccgtaaaaggccgggaagctgtccagttatcgcgctagtctactttgggcagttttcttgtccgcctttatacctgttatttcaggcacaactacgctcctgccttggaaaataggtgtcatcactacacacgcgacgcgttcttatcacatctggccctcccatgctgcagggcgctggactcgccattcgtttcatctttctatatgcacgactcaagaacattcgaagtaactgaaccggtaaataccatcttttaactggtatgttttatctcagacccccaaaatatccccatttctgacaccgtcctactcagcctccagcttctacgcggaatgtatccttaccgattttgagcgcgtcattggatatttccgaatcgaagcaatggcaacaaacaatgcataccccatatcctcaaactcacgaacaaagttgagcgcttttcgcttccaggaaggcgaagtagttcccgacggcgccagctcgaaagacgagacgacatcagtcaatgggaacaaacaacatgaggatccgggctctaacagtgtgagggagccgatgcagacttcttctgataaaggatattctccgcctctcgaagctcaagcaccggaaccccaattacaagaatcaaagccgattaaagaatgccctcagactccgggaaacaagatacctctggcagatttgatcagcaatgctgaggattcgtttaatcctgccgaagtcccggaaatgacgccagttgatcaagtcatctggcagcatgtgcctgccagctcgaacccagacacctcgtcccagacaccagcgggtcgtcgtaggaagcgccggcacagctcttcgcctactggctctccctcgaaagggactaagaaaaaggtgcaaaaagaaccctttgatcttaattcaatacaagtcctattcaagacaccgcagcatgatatggccgctgaattgtggagtaactacatggataaaaacatggtcgatggcccggatgatcttccgccgccacggttcgcaaatcttctttcctcctcaccccaaacaccaggttcgagcagaacaagtcgagactcgtcagggctgagacgcgcgattagctgcaccaccgatttccccacctctcgaacaaaacggcgacgagtcaatgaactagatgtcagccgtggcatatttcaacgaactaacagcaatgtcgaatctgggagacccaagtcttccaggatcaactatcttatggagaaaattgaaagaagcatatacatggccactgccgatgcgggtccacctggatcgtcacccctacgccaacatgtggatacacggaggtgccgatcgtcttcacccacgaagaactggaggcttcacgaggccgacgaagaaaccactgaatccccatgtgctgtaccacctgggaaagtgagaactgggaaactgcccagtcttcaagagtcgtccgacgagttcggagacgatgatcttgatcaaggtcttctggacctggttaatgcctcggaggatcctttcattgagccggcacatgcatctaccgagtttgtgtctctggggtcttctgaatgggctggccttgacgcagaaaagtctcgttcatggcagcctgaagattcaatgctcaacagcaagcctctcatgacaataccccatagcactacgactaacgaaacaaaacgcgatgatatcgatgaattcgatgaatttgaatatgaatacgatgatctgcctgacaacttgcaggaaatacttgcaaaatgtgacacaaagcccgttccggtcaatctattgaattcaacgaccgctggaccatctttgcagggatcagatacaatgaataccccggtgaatggcagtatgcatagcaaacccccaaccgccatacctgtcaaacctgaggtggcatcatcggatgatgagtttgatgatgattttgatctggaagccattgagcaaactatgaagcaagcaggtgaaggtggactcgctcatgttcgtcactcttagtcagttaatttttagatatatgctaagacagtcaaaacaaatagaacctcaaaggtcgccaagctatcaaacgttaccgggtcgttgagatcacgaagagcacatatgttaccccgaaaggacgtactcagccagagcaggtcagatacattgcccttgcctaggatatagtcccgtccgctgactttgagtacagggcttgctagttgaagacgagaaaacccgagaccgcaagtctattatcttgcgagagtcatggttcgacactccctgcagcaaggattcgtatatccacctagtcggggacttcaacgtagccggccaatgcattgtggataatttgaaccacatgatcattcttcaccccgaccatctcatttcagctacggtcgtagcagactcggtagactgccagcgacgagctgtgcttcaagatcgagtcaaagtcattggcgcactcgagcgaccgcaagcctttggagtgtttttccacgaagtttttcaagaagctctcaaagcgaacaaatgggatatgaagtcattgaagacattggtcgaaaccgtcctgggcagacacatcgaagagctgtactcgattcaaatgagtatcccagaagctgttgaatatctcatgagcaggatgcctgctgttctagactgggcagatgctttcctgcatctcaagccacaggtacgtctcacggccgctggatgggcgaaagaggccaagaaaccttgctaaccaagatcaataggccaattctatggttgaagaccgcaataactctaagctgaacttgagtatcaacaaactgcttgaggtagaggagcacatctggtccccaatgtatggcctcaaaggcaatatcgatgcgacggtacaagtcacttgccgtgaagatgaaatggagaagaacctggtggttccgctggaactcaagactgggcgaagggatacaagccagtcacatagggcccaaacagctctctacactctcctcctgtcggatcgctatggtaagtaatgaggcctccgatcctattccgactaattgactaattgctaaaattatcgcagatatcgatgttacatttgggcttctctactacctcgagttaacgaaaacactcagcatccgtgcggttcgacacgaactgctccagatgatccaggtgcgcaatcacctctctggctatattcgtgagaggcagcagcttccaccgatgctgaaaaaagctcgtcaatgtattcgatgctatgccaagactccttgtctcatctatcacaagctctccgaggatggcgatggcgagaccagtgcacttggcgaggatttcgatgcagttgttggtcacctggacaacggtgatcgggacttctttcgcaaatgggatgaacttctgaccaaagaagaaggtaatctcgtgaagtttcggcgagaactttggacattgctgagtagcgagcgagaagccctgggtcgatgcttcggggatgtcgttatcgacccgcattctgcgtatgaggagaagactgggacaaggatcaatcgctaccattatacgttcgttaaaagacaagcgtctcctggtttctcctttgctgaatcccaaatatctgtcggtgaaccaattgtcatttcggatgagaagggccattttgctctcaccaatggatacgtgctgcatactagttcttcacacatcaaggttggcgtggaccggaaacttcacaatgcacgatcaaagacgactggcttcgatgaagtcacaaatcagtctttcaggggaatcatggagattgggaaagaagagcctgctgccctgcagagcccagacgagcagctcgtttaccggatcgacaaagatgagtttagcaatggcatggccattgttcgaaataatctcatctgtatgatggataaagacttgttccaagcgaggcagcttcgacagctcattgttcaggggcaggcgcctgccttcaagacgatgtcgtcttcatactcgatctccgatcctggcaatctcaacgtagaccaaagacaagccattgacaaagtgatgagcgccaaagactatgctcttgtccttggaatgcctgggactggcaagaccacgaccattgctcatatcattagggcccttgtttctcaaggcaagagtgttcttcttacgtcttacacccacactgccgtcgacaacattctgctgaagattcgagacgacaacatccgtgtactgcgtataggtgcaaccgccaaaattcacccagatgttcaggaatttgccgatcttgccgcagtccaaaaatcaaccattgaagaacttaaggattcatacgaaaagccgcaggtcgttgccactacttgtctcggaatcaaccataacattttcaaccaacgcatttttgactattgtattgtcgacgaagcatcgcagatcacgctcccagtctgcctcggcccgattcgtatggcaaggactttcatcctggtgggtgatcactatcaattgccgccgcttgtgcagaataaagcggcccaggaaggaggacttgatatcagtctcttcaaactactatcggatgcacaaccaggttcggttgtcaacctagagcatcagtaccgcatgtgtgaggaaatcatgttactttcaaacactctgatttactcgggccgtctcaaatgcggcacgccgcaggtagcagcccgatctttggatatacccgacatcaacgcactagagaaattccatggcgaggacttgagtcatgctctgtcacagtcaacccgagaaatatgcccgggtgtccccagtagcccgtgttggctccgagacttactgacgccatctgcgaagacccgcctggtcaacaccgatcccatcggtcccgcagccctcgagatagcacagggaaaccgtgtcgtgaatcacatggaggtcttcctttgctcgcaacttgtggagtcattcattgcctgtggtattcccgcgcgcgacattggtgtgatcactttctaccgcagtcaactctcgctcattcgccagagcctgcgacgctacggcccagatctggaaatgcacaccacagacaagttccaaggccgcgacaaagcggtcatcattttgagctgcgtccgcagtaacgccgaaaacaacgtcggcgagctactgcgcgactggcgccgtgtcaacgtcgccttcacccgcgcccagaccaagctcctcgttgtcggcagcagatccactctccgtgatggcaacgagctcctctgcaaatatgtgcgcctgatggaaagcaaaaattgggtttataacttgcccagcggagcgatagacaagcatttcttcccctcttgtaccacacaatcgcagctcatgtctccgggtgcggctttgactcctcgctctaccaagggcaaaggtaatggcaagaacaaattgcctccttcgcgttcttcccgtgaaccactgagcccattgggctcccgacaagcagcgcccggtctacgaaagccttccaagacaggtgcaaagttgttcaacggcacgaaggtggttgggaatcggcccatcttacgagacatagtgaatgacttgacgggctagcacacctagcatacaatgtttcaaacaaggcccttgtttctgttcttcaaatgcagatcgaggcgtcgcgttttatcatcacacgcgacttggcacgctgatacaaccattcgtcttacatatggttttttttcttttgggcttgggaaatacactaagcactgcagcctgttggttattagctgtcaaatgtagtcccattgtgaaactgtagttttcaaataagcaacagcagacgctcgacattcagcctctcaattaattgaatttacaatggaattgataaatgaaaaaatcgtattcatgtaggctacaatccatgtgtacctactgcggcaccttgatcaccgcccttctcatgggcaaacacctccttctcaacaccctccgttctttccttgaatcgctcgcaaatgttcacgcatgtgctagaagagcaccatctccgcgcaattctacttagtagaaactcgtgccttcttcgcctggggtccattcaggtaggtacggtcgccattggggctaacagtccaccgggcatggttgtttgggttggccacaaaattggtaggcacgatgttctccgcaaactcgaatgttctcttcttaggcgaagcggcagaaagggaagaaacagactgcatgtgctcctgggtaggggtgtaataaggtccctgcatttgttgggtgggtcgccgaacctgctgggccgctgaggcatggagttgctgggtttgccgcatggcagactgcacgcgcgccttaaaaggagtttggtacaaggtgggctgctgctgctgagccactgaatcttgaagtttctgggatagtcggatcacagacgccatgcgctccttggaaggggtgtgatggactgcttgcatatggtaggcgggctgctggacctgctgggcctctgtagcttggcgttgttgggtttgttgcatcaaagatcgcacgcgctcattgggaggggtgggataaactccctgcatttgatgggtgggctgaacctgctgagttgctgtagcttggtattgctgggtctgctgcatcgcagactgcatgcgctcattggtattgggaggggtatgataaattccctgcatgtggggggtggcctgctgaacctgtggacccgctgcggttgggaatggatgggtctgctgcatttgatgctgtcgctgagaccggtattcacggacttgcgctttgtgcttcatgaccttgtccagacacagctgaaactgctgttgatggagccgacgctgctgttggtagatcaggagctgctgttgatccccgggtggctgacgttcgaggtgagcttgctgttgctgaagttgatcccattcaacacgaagatatttctcttcattttgaagacgctcatggatttcaagctggttctgttgactgggatgggctgctgccactggcgtcatcaaggtagaaacaggggtcatcggggcagagaactgagtcattggtgtcatcggggcagacgcaattttctgagatggcgtgactgaggccaagattgtttttcccttcgccttgcgtggggtgctttgcacttttgtcttcttctgtttcttgtgtagctcgtcatcttgcttcctcttagggacccgcttggctgccttattgggtgactgcttaggattagggcccggtttgccttgtgaccaatcaaagaccttgaccgtttcagttgctgagctgggggtggcaggaggagctggagcaatattggcgatgtcgctgactgaatgggtcgcttggataaccggggcatcagtggcaggagtgacttgaacagtgggatcactgatgaccgaagcgcgctgggtgaatttagcagcgaattgcgtgactgcagcgactcgagcgacatgggcagcagtgataggagcggtagtaacaagagcagcggtgacaggagcaactttaacagccggatcaatgatggcttgagtatgttgagtgactggagcataagtggcgcaagcaggtcggatgaatgcaaggggaggacccaggtcggcgttttcgagagacaagagggtatccagcggatagactgtgctaggctgcttggtggaagtgctcagtttggtggaagtgctcagtttggcggaagtgctcagtttgggcacatcatcatcaacgacgatgggattacacaagccaccgtgaagctccaggtgatccagagtcgctgggccaaggacagggtcctcaccgagtgggacaaaggcatcttcgaaagtcgagccggacgtgttgtcctctccctcgaagtgatatcctaggaacacaagtcagttcagttcgactttcgtaaataaggagatgtacgtaccattagcacgagcgagttcccaaaggtcattggggaaacctgtctcgggaattttccattcttcgaggcccaggatacggccttcattagaaggcacaccgacggggctcgaattaggcttttgcgagtcttgatcgcaaggcacatcgacaaatgcgtcgaaaaatgattgggtaggatccataataggctccataacgaatgatagaataaaatgtgaatgtgaatgtgaatgagagtacaggtgatagagctgtcgagtcaaagaaggtgcagaaacacacaaaagacggatgaagtgtgttgattgctgagcgagtggaagactcgaagagcacaggctatgaaacagctaattgtatcttgtagtgaatgaatggtggtgggatgagaatgaaaatgcaatgagcatgggaaatgggaaggagagagaggaaagaagaagaaaagaggggggatggcagaagaggatcgtgggagtgtagcgatgtagcgatgtgctcatgtgctctcttcagggcaagataatgggtggttggagccctatgccccatggggaagttcaagtgtttgcaaagggcaagagttaggtcagggctcggtcactgatgctcccatcaactcccaacagaaagtcacccggccagttcccacggttccttcgtccttcacctgagacgtctggctagattcactagactgtgcactagactgtccactaggaagaaccataaccatgaatccgtcccttccttccacggcttctttacctagagtagcgacggcaagtgcaaaccagctggccttggtgttttgcctttccattagacaatgttagctcttgaccagcctttttttgtaaataatattcgtgactcacaacatattgaggaacagctgcatagtccaacgggaggatatcaaaccatgccattttaagctcatcaaatcagaggcctggccttcctctgcgtctggagccgcataccgactaaggtacggatcgacgtcatcttccccagacaaccgcggagaagccatctgaaccatggcaatccattcggatagggagccacaatattcctgcagatcatcttccgacatattctcgagtactttcccgttttcgtaaaagggcggagtgattatttgctcgtgggcaatttcctgtggctcgcaggttatcaactgtggttgaaccttgtcgatcggcttgtttcctgctccaacttttagtatattcttgctactatttccttttttggcttcggagacatgatcaccttcacccggaccagggttgctttccaggtcgtggaagagccaggccattgattgagtcagaacattggtgaatgcccatacaattctttcgaagcccttcttgccatgcagcatcgagggcagccgtaagttcaattctaccactgacgacattattagtaaatattcgaccagcccatttgctctgattgtacatacagaatctttcttttgcatgttttctgccgccgctgcggaaaggcttgccagtgagacctgttcgctcatatatctcctttcctagttcaattcgaagtacgcctatttccattcgagtcaactttcggtcctgcaacggagactcttccagccgcagcttcggggaaacgaaccgtctttgagtgtgaagacattatcggatcccgagcgtccttcggagatcatcaaaatattccctatgtcccaagtcagagtgccgtctttgatgaaatggtctctctgggcacaaaagctgtctgatgcttgtgcaaatgatggccactcaaatgtggaagagcctttatactggtctggcggagacataaatacctgacttgatgtatgtgttgaagaattcatgctcaagcagagccgaaggagtcatgaagactcgtgcatatcgaggtttttccagtttggtctcgagcgacggcttgatctgtgagtagaactcctttggcaggataacctcgacctatgaccaacaatcagtcaaatgacccttaatctctcaaaaaagccatagaccacctactgagtgtacaaatgcatgattttgaatcgttgaaaagggcgatctcttgcttgggacctgctttgggttgatgaacgccggcagctgagtgatggttgtgaagcacttttcgcgacgagacgattcgtctacttcttgaaacatgttgtctctgatagttttcgaagtgatgctcaacgttgacaatcgacgctctcgagttttgaagaatcaaatttccagccgaagggtgaggttcgattaagctcgggcttatcggacccataaggctgcagctatcaaaccttccacattcaaatggaatttgggatattctatcaacttctaggtagccattgtaggaatattatacagaaaccagatgtattggccttgaatggcatgtatgaattcaagatcaaggttatcaataaatattagtagtctcaatttcgtaacgagtataatggctcaatgtagctttgctcttatgtcacttgtaaaggtaatctgaaattaggtagagctcagtctaaatacttctgaatagaagttcactccaatggctcttattatgtggtcattgtgtacatatatgcatgtattcatatagagcaaacaacatacacgtcaattagaatggataatgcatctaaacaataccaataacatacaacgtacgcctctacaaagaaacagaaaatgtaattaattcaaaaacaatcataattcaccaattgtaacctaagaaatcatattgtctatggcatatttcctggtggtgtgccaaaacgcattttttccgggaaactgcaaggcgtagctaattacaaagctcactcacttcttactatttactttatgtaattcccattttttctagtgacccaatcgcaacttggacgcaaaatccaattccaatccaatacattatacggcacagggagcagttcacccaacttctgtaatttgtttttgaaacctcaccaataccaactttggtattaaccgaacatataaagctgttttctgatctctgtctccgaaagccgctccaagccgaaagaaccggtcgaatcatcgacaacggtcgcccgctcaacaaaccaatcggtcattttatacccatcactatcgaggatcataagctggataagaatgctgggacgtactactacccccgcagcggtcaaaatgtcatcatatccctgcatggcatgatatgtatcggcattataattgagttgtggccaaatctgaagtgaaaacggtctgtatattgcttccggtatcattggagatttccacaatgatatatgggagatcctcagaatcacagtctgtgacgtggggtgacagtctgagtcgtgcgtagaactggttgaacgcgtcccgcggtcaatttcggaagcattgacctgggataaaatataccttatgcatcgcaccaggttctgtttgtacgcaagaattccagagtttcatctgttgccgttctttctatgacgagattagtcgttgaatctttttcaaaagaccttttcgaggatagggaagtataccatgtcatgctcgaggctttgctgtatcatctgccggctcaccccctgaaaagcttaggagttagggataaagctaattgttctacaagaagaccttacctcaaaccacactggtcgatccataattcctcgagatcgggtaaggaatgatagacctgaccgtcgcacacatatatagatctcccattgggtggtctaaggagaaacctaagcttctcagttttatacatattaatcacaaactgaatattggaccattgcgacttgatgctctcgtccttgaggtatccctcaagtttcttgatgcgttcttctcctgagacctcataggggtgcgagatagcgggaagagctttgctaaggtcgaacttttcgatatgttccatcttgactagaaatcattaatggatgatttgggttgaaagaggagtttcccatacaatatatggagataacgggagaagttagcttctgggtttatttcttagtggaatgaatgtaggacggaaggacagcgaagcggcagttattaagtatttgacctcaggtatcatgggaccttggggacctcggggttcacctgggcatcaacgacaagggtattagggtcttgtccactatcacatcacatacatgagcttggcaagcgccaagtaatcactgataaggaccactggtggtgccgataaagattccccggcagtatcgggctacccaaaggcggtatccgagtactctccaattcggtccgtctatcgttcgaatagcattcagtctaaaccgctaggtcctatcggtcttatttctgctactgcttctgccgctggttcgaatgcaggtagacatccggtcttgcgccaattgctagaggagcaagacgaagagatggcgcccgcttcgcgtcgcgagctcctacacaaggatcactttgcattcgtttttggaagcgtgaagactcaaaactacttagatcctgtttccaaaggaccaggctctcacacgtgagtgtggcttttgcgcccggggctgtcgtttatttgctgacaacgatctggaaccacaggattcgcactcttgcttggaacccaacgggccagctgattgccactggctcagcagatcgcactctacgaatctggaaccctgaacgtcctaatgtacgatactccaccgaattgcgtggtcacacagctggtatcgagaaggctcttttcaacccagtccgcgacgcggagctagccagttgctcggccgatggtacggtgcgcttctgggatgtgcgctccaaaacatgtgtgagccgtctagatgtcggcggcgaagcatttacactctcctggtctgctgatggcagcacaatgatcgtcggcaagaaggtaaccatgctgcgctgcgactccgcagacttgatctctctagtggcacagtcactaacatatgatatgtaaacaggacgacaccttaatccccgtctccgttcaattcccctcttctcctaccacccatcctgatggcgcaaatgctcttaacctcccctcctctacacccggcgcaaccacatacacagctctcgaccctcaccctcaaaccgtccaaacaaatgcgacaaccttctcctggtgcatgccgacacctgaacgtccggggcagcaaatattcgtgacgactggcgaaggcaaggtcaagatcatgtcctacccttccttcgatatcatgcacactctcaacgcccacacctcggcctgcctttcaattgcgctcgcgccgacaggccgatacctcgcagtcggtgggagcgatgctctcatctccctctgggatacaaccgactggatctgtcgtcgcactttgtccagcgagaatggtggtgctattcgtggcgtgagctggagcttcgatggccgctacattgtaggcgcatgcgacgagcttggatgtggtgggaatggactggagatcttccacgcggagtctggtgatagtatttacacgattcctactgccggcatcaatgccggtgtctctgctgttgcgtggcatccatctcgctactggctagcttactcgactaccactgatggacctggtagctccagcgctggaggcttgaagattgtcggtgctgctggtggtggcttgtaatctcgagccttagattttgcttcctcttcttgggcaggcctttttttagccctaccctatcaaactatcatgaatggacgtatcgagaaagaaaaaaaagggacgagtgccaaattagatcaatagatttattgattgtagtgcttgtagtgattggctattaacatggattgacaggccgaaatactccaattaccaaccgtataagctatccaagagtgaagagctccgccccaaaaagaccgttcattcgttcgtcatcaaatcattcaaaagcagagctcaatggaagcttatcaggctgccacttcactcgaacattgtgggaagaagataattgcaaaggggttaggagttccgtaagtaaatcaggaaaagaagatactcggtccaagatatcgtgataagtgaccccaatatttgtggaactagggcgagggagagaaaacaagcaaaagagaagtacccaataggatgacgacctgcttcgagtcgcatgtgagaggattgataaaggcgtcgatgaattagtgagaggctaggatctcatattatgagcagattgagggactcaatgtcatccgttcagcggcaacacgagagatttcacttgttgcaacaatctcaagcgagatgagttatgacactggagactattgaaccatattccaacacgcgttgcgctcatgatggccgccagttctcccagccagcgttgatcggactttcaccctggatttgaccattcaagatttgagcccattgagattcactgaaagcctccatgtttaggttaccaaagccttcattgcccgtttctggatttgagggtggaaggtcccatgcagagggcatggagaagatccccgacgctcctgcaaccgacgggctattagagctgtttggataaaaccgaccagacatggaatccaaatcggtggctcgcggatttgtgtttccttgtggcatgatgtctgaattgaccttatcaaaggactgggctgactcctgactcggatatcccgagtttgtctttcgattcttgtttccgggcggtgggtcgtcagcgccattgattgaataggaagtgttggaagatgagttcaaggttgagggggtgggatggtctgatggtgggttgtttctgtcgctgaggttgccgaaatcagatcggaaatccatgtctgtatcgataatggcccctggtggtccggcttgatccgtcgcctgagtggaggttccgaaaaagtgacttgtgtcatcgccattaaagactggtcctgcagtgggctgtgtcgttgagtccctgttccggcttgggagcgacgtcgtcaaaccggcaggcataggctgattgccgccgcgattggtactgtattgtggaggcacctccttcgccatcccttgtgtttggcggaggttgtatatgggagtacattcgaccttatcgttgcagtatgattgctagagaagattggattagcttcgattggccatttggaaacaagcccgggaaacctactaccatggaatgtgcagcagacatgttggttctctgtctatcgtccaaagcacgaatgccagttccatcaaggtcaacatccaattgaacaagaaaggactcggtcagagggtttttgttcttcatcgcggtcagagcggagacaagaaattgtaacgaggaataaacactcgagtcatctggtcgggatttaagatactgcacaaaaacacgagcggcaatatagagacaaaatgacatgaaaggattcagctgcaaggcgttagtgcaaatgctttttaagtaagaaagctcaatagaaactcacgctcgtcagatcaacgtggctgatcatcttcatggtactcgaaatctggtttgcggcgacaaggcacctgcgcttgctctcggtcgtaatctgattcggcatcttgttcttttcggccttgaatattgccgcttggtgaagacatatagttgaagtatgaatgctcatgttggcgaaaatgacgttcacgtccgagacgccacttgggagtcgaagatgatcaggcaacgagagcgaaatgtgcaaaagaatattatcatggctcctgtggcgcttccaaaaatctccattgaggtcatgatcgttgtcttggggctgaggccgatggatatgtatgagattacgaccgaaaagacttgccagaaccaccacgcatgcaaaaggggctagtgtagatacaccctctccggcaatgatatcgttcagaggaagtgttcgttgtggcttgctcttggtaaaagagtcttcggatgcggggaggtttgtcataatctgattgtcgtcagcatacagctctgcgctataagagggttcacgagatactaacatcgttctcatcaataagaatgggccagccagttccaacgctcgaatatcgatccgtggcaaatgcgccccagaagactctcctacgttcttcgcgctctgtccaatctttcggtggtaaaatggattgtttgacgtcgagaccaacaccatcaagacgattcaatcccagcatcagtgcgagtcttgcggctttaccaacactcagccaggctcgtgggaagaagatcattcggaattcatatgtgccgataaataaccatgtttggcaatgtgctaaactgacgatgttctctccgaatcctttcatttcgtccgcctcggcatatttgcgtgcccgctggtagaaatgactatgtaggaagaagtatttgtcgctgacagatgcggcattgcaccacataatgtatcgcaagcagatcggtgggcgcatattaggggcaagattcagggctgcatagtaacgcgggcggtggataatgggcatcattggatagattttctcaaagaataaagcgtccctgcacggtaccaatgtattagtgaccacaagtagaaaggcgcatagaacacgtacagttcatcgatcacgtcctgtggaggaaggggctcctctagtcctagactgatcaagtcccattgagagttgtcaccctgggtaattggcggcggaggatacaaaatttgacttggctggcctgcgccgggggcaatagaagctgagaacgaattatccatgttgcctccaatgcctgccagccctcctaggtccgaaaggtcgggcaaatccagtatagattcatcggcgataggtgctgtgaatgcattctccaatggttgaggttgggaggttcgttgggtgggttccggatcctggactttgagaagagtctctacctgagctgataaagtcatgatcgtcagtgatatagctcacggtcaatacggcatttgcgaccattgtcccagcaagttcgtacctaaccgcgcttcaagctgcttaacatatccccgtttaggaccactcttcttccgcacttcatcgtaagaacattcatgtcccagacgtgagcaagtcccacagctcgggcgtctcccatcacaccttagtttcctcctccgacagacgacacatgcgatgcgcttggggcggggaacgaagttggtttctccggtgctagtgctttcggcagcggcgccactttcactagacatgaattccatttgagacgggccgaattctgtggagtattgcgacgattcgggtccaaaagtagacgccggaggtgccgccatagcgggcttgattgcagacttgtgatctcggaatatggtgcagtaggtgagtaattcgagtgaatgaattgatcttgaatagctccggtttgtccgggcgcggtgttattaggcagaagctaataggatagacctgaggcgtcaagagccaggaacatccaaatgttggccagatgtgccgaagtggggatgtgaaaaggaagttctatgaatgatggcgaagttcgtatcagcagaggctgagcgtccggcccaacctgtctttatgaggagctagatcaaagagcccctatagttcctttcgatcggattctaattagagccatgggaaagtcctgaattttcattctaatccccaacaagacccttgacaggtgcgatcagcggagtgccacgcaccagctacactgcctggaggcttggcacacatctagtgggatccggctaatcagagtagagatagagtatcttgtacggagtatgtgcacaccattatatatatctactatgtgcagagagaggaagcggtttctaaatctattttctttcgctttgaatgcatatggcctcgagccatcgtactgtacagtgcccattgcccgagtttcagtctgcgcaaaacaataacccccaagaaatagcgcgtggtagaagaaacgatgagacatttgatgtgtagaaaaaaacaggaaaagatatcgtacagtcatcctctgcgcggtagggatgaggtatagggtgaggaggtacaaatgggtcagagacaaagcagagtgaaatgcccagttcggcaaagcagcatcatctttagttgtatccacgacggcgctttccttggttgcgaggtctggcatgaacaacggccttgttgatcttccactttgggcgggtcttgtagccggatttggtctagaggtgaaaagtaagagtcagcccgatggaagttcagaagatacaaaacaaaaggatatacataccggaataccccaaggactcttcgggtcgacgttacccttagactttcctcgtccaccaccgtggggatggtccatggcgttcatggccagaccacgcaccgtcggacgaatgttaagccagcgtgagcgaccagcctttccgagctgggtgtattggtagttcgggttgctggtaataccaacggtagcgcagcagtccttgtggatgagccgagtctctccacttgagagacggacagtgatgtgctgggccagacgctcctgcttctgctggtcacgctgcgacaagggcttcttctcggcctcgggctcttcgttttgaatcgtttgctgacgcgagtcactacccttggccacaactgtagcatatgttccagcactccgacacaattgaccacccttcccgggtcgcaatcccaagttgaagatcaatgttcccactggaaccatgtgcaacggcagacaatttcctctccaggcggttctggccgcgagcacaccgggatcgacagtgctgcccatgctcttccacaagtcttcgggaattccggacatataactctggaccacgtcgccggcgcgcataccgtccgcggcgagaatgtagctcaacttgccggtctccttactagaagtcagggcgatatgcgctgtgcgcccgggatcatactcgatacgctccactgtgtgcggccccggagccatgcgcagaaaatcgatcgtccgaattcgacgcttggcaccacctccatgatggcggacagtgactcggccagagttgtttcgaccacccttggcgtggccacgcttgggaaacgttaatttgtgcacagggcggcctttccacaaatgatcattgacaggacgccgcaaatgtctcacaccgggggttcgcggagtgtaggtgcgcagctgaatgccagaagcatcacggccgggtggaggagcgaacgagacattcgggtcaataaaagagttcgtcggcgtttcgatagacttgggcttgatcttctcaatttcattcacgattgttgaatagcctcggattggcaaaggcagagaggagagacacctaaagggcagccgaatgccccgtagggcaattcggggttgaagcattgctgccaaaggattgggggggggggaggatggaagagacggggcttaagggaatcaattgaatgaaagtgtgattgatgaaagccaaaacgtcaatagagcagaccaacaaagactcaacagctcctctcctctgctttgtagatatgcacctaactctccacaggaacaaaaagttcgatggtcacgtgactctcttactgcaccgcctctcccactgccacaacgcgtaaaaggtggctgatgtcaggtcacggggcttccacggttcatcgttgtcaatctcaccgccctatgtccgattcgatacacgtgactcctttgttacgtgaggttcgatactatacgagaccgaaacggtcgttgtcgcagcaaccactttatttactcgttgccatactcacgcgtatctcccttcattgctggatctacttttctcgactatctcagcacatctttttcttgtttctattccgttcttcattgctcagctcaattcttcatcctagaaatttacaatagagaggtcttgaacgccaacccggtgatccacgcgactggctgagtggggcaacttgttttccacgctaagcacagtactagggccaaacatcgccttttgccctcaagctctcttccttttccctcatcattccagttaaagctacccttccatcttcccaccccccccccccactccaaactaacaaattatcgcgtgcggattcctgttgtacagtgtccccagatcaattctgtatcatttgccatctttttccccgaattcgcgcgccatttgatcttcggaaccagggttctgcgcggtcttgatacacatcaacatagtctcctttgagccgtaagcaccgactcatatcatctccacctgtctgaaagctctctctgcctactggcattgtagtctcttcagcacaactgcattttcactcttggtacgtgcacctcgtccttcatcctctggtatgaggtccccgccaaggtaatatcaaatggaatgctgacctgatttcccgagtaggacaagaaccattatatccctgtcccctttctcccttccctacgcgtcgttttccttttattttcctcaagatgcctcaggtgagcaatctttagcctgccaaaacacgtgtttgatatcctagtcgcgggatatctaatccatagcctcgagatctgggtgtatcctatgacctcactagaccgaccactaactccactacaggcccgcagccttcgtacgagaagcacgatgaatgaaaacgatgagaacggtccgtcagcacgtgtgacacgggccaaagcagccgccctcagcaccgatgcctctgccgctggagctaagaaaggcctgcagactaagcgagccacatccaccaccactaatggatcgcaacgtcctcgtgctgcactcggtgatgtcagcaacgtcaacaagaccgacggtgctgagatcaaaggtgggaagaagccggtcgctgccaaggttggtttgacttcaaaggcaactgtccagactggaggtgttcagaaactcagccgcaacaactcgtcacgaaccgcatcacgatctgccctccaaccccgcgactcgaacaagaaacctggtcccaacgcccataagcgtccgtcgcttaaggatacagccatctcggaagagcctccccgcaagaagaccgagcttgagcgaaagaagcccgaggccgaacggaagaagcctgagctcgagcgaaaggcccgaattatcgagaagattgtggaagaagaggaagtgaaggaggtggagatcagcgtgaaggatgctctgaacgaggccgtgcaagatctggacactgaggacttggatgacccattaatggccgctgaatacgtggttgaaatcttcgagtatctcagggaccttgagatcattactctgcccaaccctgattacatcgaccaccagcccgaccttgaatggaagatgcgtgggatccttgtcgactggcttatcgaagtgcacacccgtttccgtctgctccccgagaccctgttcctcgccgtcaacatcatcgatcgcttcctgtcggctgaagttgtcgcccttgatcgtcttcagctcgttggtgtcaccgccatgttcattgcttctaagtatgaggaggtgctttcccctcacgtcgccaacttcagccatgtcgccgatgagaccttctcggataaggaaatcctcgatgccgaacgtcacgtcctcgcaaccctcgagtacaacatgagcttccccaaccccatgaacttcctgcgacgcatctccaaggccgataactatgatatccaaacccgcactctgggcaaatacttgatggagatcagtctcctcgatcaccgtttcatgtgctacccgcagagtcacatctctgccgcagccatgtaccttgcacgtctcatcctcgagcgtggaccttgggtatgtttttttttttaaaaaaattcgttttgcctgtgccacacagcccaactaacttgtcataggatgccactctcgctcactatgctggatacaccgaagaggagatcgatcccgtcttccaattgatggttgattatctccaccgtcccgtctcccacgaagcctttttcaagaaatacgccagcaaaaagttcctcaagggtaaactactttgataatccccttgtcgcgagatcaaatattaaccgttttgcagcttctatcttgacccgccaatgggctaagaagtatcaccacctatacgttgacgtctccgaccatgtcacttacaaggtggaacagtaattgtaccacttacgatgtcatgctactcctgtctcggcaaagtcgattcctttcatgacttcctaaggctcttgcgacgacttgagcagggaaatcgaattcctacatatgttggcatttcattgtgctggtattcactaccttttgcatattcttacgacgacttgattaaatttctgcgctttccgcatttgtcttctgtggtggggtgttcggcgcttgtccctgtctgctattgttctcttattttacccacacatcaacctcggcttgcttgttttacatgcgtgagcattgtctcccgcctgtcttgatatcttttacattgtcgtcatcgtgttgcaggagtcgggatctatttttctccttcaaatctcagttttaccttgtctcgccctcattcaccctcgtcataggttggacggtgcagtgttatcccttttggatcctttttttgtttggcatgcaagttcccaaggcttgcacgtttgcgtggcattgcggattggaatattttgtggagccaaggtggctatggtttttgttttgtttctcaggtgtttctcaattcatcggctggaagattcaattggttgctagagctgagtcttctaggcatgcaaaattggtatcagatggacggtcgaggaggtaatcagtgacaacttgggccgcttttgttttcttcaaaatagttggatttctaacactggatccgtgtgtatggcatgcttattggaaccatttctctttttattctttcttgttggttttctgatagatctggggttggttgtagatgcgtgcaattaagctcacctgggcctgcttagccgaggctggtcccgaggtccttccaaggttagccccggggcacggtaagccgctgaattacctttgggaaccttactagttgcatccgtccttgaggctgatactggactggattgacaataataacccaacatcccgacggaataaatatatgattctatctcgtcatggattccaccgcacccccgccgtgcccattctgcaatatcgcctcatcatatcccccaacccccttcaatgaccctgagttcaacccagtctctactgccccggattcaggtccattgtcccacatcatcctctctactgagcatgtcctcgccttcttggacattatgccgcttacccgcggccatgtccttgtagcgccaaggaatcattacaagatgctaggagacatgggtgttcaagcagggcaggaggtacgtagttatttaccatctgcgcttattccaaaacgcttccttgactgatccatgtctttgatttcatacatagatggggaaatggctgcctatcctctccagggttgtaacgaaaactgtgtttggcgatgatccagatagacattggaatgttgtgcagaataatggtatgtcttgcccttgcttttctccatttcccgaaacccttgatctttaaattatcggatttgaatacggggtatttctacgttttatgctgttatgtatgttatgtaccaagattggcattcaaggaggttgaacgcccctgaccgatatcttaatattttttgtcgctaaaacagaacggcatcttctgatcacatgtctatggaagaaggaaaaaagcaatcatctaactgagtgacaggcgaaagagcagcacaggtagtaccccacgtccatttccatatcatcccgcgccctgctcaaggggtcaatcagagaacaagctttgctatgttcggccgtgggcagagagaggagctcgacgatgatgagggtgaggccttggctcgtgagatgagagttgaactggctgaggaagtcaaacgaattcaaagagacgagggtatagacttggctggaggcttggtttcagaggaaagcaagcgagggaagttataaagcacgctgtccctagtactctcttttgttcttgcatctatcattggtcccgtcttcgggttttcgctgtatatagctatttccatcgatcggtgttcggaagtccccgggctgaagcttcctgtctgatttactatgttgaggttcttattctgtctttttttgatcctgatcgacccgggtgccgtggcctcggagcatatgctagttcgacaagttagccgggtagtaagtcatcaactcccaaataatacgtaccactcgtcggaatgcattgaggtcatccgcagtagtaccctcgtcgtcaatctttttccgggccagtgtaacatccgacagttctccctcaggtagacggcggtacgttataagtcggcgagcccctgtaagatataaaatcagccgatgcctttcgacatggttgtagcacaaggctgtcacttacaagtgttgaaactctgaacagagatactgacgatctcgaggttctgatgcatgggaacagggaactcggttttctcatcatttgttgtgggcatccacattgacaaacgcccattgggaactaaggagcgaactgcgaagttgagaacgtcgttttgtagagcctcgaagccatacggccttttgggagcaatgaaaccaggtcggctacaggttaaagtcagtatttcaagtcggagaggagaagcaagaacacatacagataggcaggaatgccatcaatgatcacattgaccgcaggtttcccctttcgatttcccaaaacacgaagcccttcacgcacaccgtatggcggatcgcacacaataccatccagcacggcggttctcgtcagtggtgtattggtaagatcggaagtgaacgtatcaatgaacttgctcttgatcccatattgatcgaagttctcgtatacgcccagttttcctttctctttgccacggaagctgcgaccatcaatgtctgcacccaaagtcagagccccgaaatgcgaagcagcaactatgaagctcccagttccgacaaacggatcaaagaacaattttccaggcgccgcaagagccatgttcgccgtaatgagactcaactctgcatccatggaagtcgtgctgatataacgacgcttcttgaggtcgtatttgagcacgtcctcgcgacagctatcagcaatcttgcgactgagataaatcttccgcggatcttccgttcgcgaaacgcccagtttagaaacttcaacgtcgtcgatgtactcttccatcacaaaaaactcctcatcggggtcttttagccggatcgggcctttgaaccccatatatgagaaggatcgaatgatctctcccttctgaactaggctgcgcgttcctgcaaagtagtcaattgtgaatttgaatgggacagcaatgtagtcgttccagcgatgctgagttcgtcgacggacatctgcatgtagctcttcatagttggtgccttcgccccaaagctcgaagatgtccttgactagaatactgcgcttggcaactgcccgcgccgcggcttcatctggtagtctcacgacacagtatggtgactagggatatcagtcaaaattctgcaaattgaggatagtcatgaaaggatagagagaggaagggtgacatcgttgtggaccaatattcatggagtatggacaaatgacgatcccagtatcgatagaaagggtatcatacatattcattgtaggtgatgaattcgatgtcggcgccggcgagcgtggcacaggcttgaagttccggccgtcggaaggtctcatggagttgggcgaaccgaaccagataatccatggctagcgagacgaatatctgactgctttattcaaggatccctctttagtgggagtttatgtaactcgttgctgctttgaaggcggggtgttgcgggttgagatttttttttctcgggtcttcagaaatatactccacggcgacaaagtatgttcagagatagtatggtttgatatctccaacaaaatcaattatgttttgcaaatactacatttagcataaagagataattgctatcttggaatatgacttaaatgtttcaatcgaaaagggctgtacacaagagaatgaaatgattgattgaactacagtcgacgaaacccaggtctacccacgtatgatatcgcaccaaaaaaagaaaaagaaacagaatacataagatatatcaccacatctagctatgaacaaaaacccaaagatacgccctcccttaagatagaagcaagacatgcccaaaactccacccctatgcaccgactacctggaaaacatgtcgtgactcatatccctccaccgaggtaatatccaccttctcatcggctggtatcatatgatgttgcagatcccaaccggcccgacgagacagttctgatactaccacatcacagtcacccaagagatcaatatcgaactcggtatgtgacacaggctacacgccatgatcagtatgatacattgtcaatttcatcagcatgacttacagtgcgcgatatatagatctgcgggacgtggcgaggcagaatcccgggtacttcagcaacgggggctaccttcaacgaggtcccgatcacaatgactaggtctgctagctcccgatcttggtggattagtcgttcgccaaactcatcgggcaggtcctcgccaaaaaacgtgatatcaggctatacttttcgtaagtatggaggaaagcaaacaagggattcaatgatcactgaccttcatcactccaggagtcgggatttcatagtcgtcctcatctgaactgtcgccggagaccttgcggtctttctggtgaccattggaacttcgtttgcgcttaagaccttgcggctttagttctctctttgcaatgctctccttgcaggcggtgcagtgggggacatttcccgccctgatttcatcgaagatcgtgtcgccagggacattgaacccacacttcacgcaggtagccctcgcaaaggatccatgacattgtacaattttttccggaagtaccccggcatttgcttcaatgttatcgatattctgcgtgtagttagtcaacagcttccccttgtcttgtagaagccgaatgaacgcatgggtgggcgaccatttcttttccgttgggagaatatccttagcaatggaaaagaaaatattcggatcctccctgaagatatggatatcgaagacttcttgtggatcgctcaggcccaggtgcgccagttttgaatagagcccggtatccttcgaacggaaatcgggaatacccagacttgtggagatctgataaaatacccgttagcacttattgaggaatattcaatacactttgctttgtacgtacacctgcgcccgttagaacgacgatgttccgagactcgcgaaggagccgaacagcatcgtcgatggtgttgtactggggaagcttaggcctccgggagaactcgcgcgagatcgcgaccgccagaagagaatgataggactcatccggtgcaccgtcgaggaatgccggaggcatgattccaaacgctgtgcataactttttggccgtgacggtttcgcggaggatggtctcttctacgaacgccgccttgccaatcgcatgcagacgctgtcggtatgcagtcgcctcttccagagtacaggcaccgggaactgcgacagaaaaccgaccagattagccaatattcgttctgatctccgaagcgggggtgtccggggtaagaggtgagggtggatatagttacataccgaggccgtcgcggatctggtcatcgcgtaggaactggatcgcctcatcgcagttagacagagtatcccatgcatcggaatcatcactgtccgtctccaaatccgacggaatctcaagtgcgaggtccggcgcgtcgtcctccatgtcgtactgtttctccatatccacggcccccacttcgaccacagtggtctctagcgaagtctctccttttggggctggtatcaaatccattttgcaggagtttgagattccagccacggagacaaactcgtttcactcgcgcttgcaatctgctctggcaaaaattcgggcgtctgcctcaccggaggcaacttaatccggaaccgatgaatgaattgcagtggcgatgtcaaagaagttttggtttgtagttcagggggttcggcatgaaagagagaattggggggaaaatcaaagaaactacttttagtggtatcaaatcaaacagatcaatgaacatgtacatcatctcatgtggtcgtcacttttggtatctatgaatccgccatctcatcgtcagagtcaacttcgatctccacatccgaatcctcgccttctccctctccttcagcttcactctcatcatcctctccaatttctttgtttatttcctgtacaagctccaaggcatgatcgcggagccggtcatcctcatactgaaggacatcgtagagcttcaagctttgcttgagccattcacgactagcatctagtgatgcatgtcgcggggactcggcaagctcatcagcggtcgcatccttaggtgcctgttgtttttctgccagcaggaagagacaccagcctccgaggtaccaggcctctacactttcatcatcctctagaatcaagcgctcgaggacttccagagcctcaaactccatattcacttccatcaggagtcgcgcaagactgatgcgcaccgcaaaatcgggaattctgagatcttctggggccaggtccttccagaggctcatactgcgagtgagcgcggcttgcgcatcttcagtgcgcagttgtgagatccggatggacgcgagggtctgtagtacctctggcgcttcgggtgtgacaagaatcgcttccgtaataagtgcttcacaccgagcttcggcatcctcttcccagctaagcgaaaatgttagcgtcagcgcgcaatgaagtttggaatatatagaaactcacgaaagatcggtcatgtaggtttcggcgacagcgcagagtgcgttagacaacttagtcttcttctgtgtaatatcggcaatctgctctggtgactttttcccctcaagagactgaatagtctgtctgagggacgccacacccatctcgaaccacaggacgctgtcctttccaccttgttcactcaattgtgcaagccataggaacttctcagctcctccaccctgggattccggtatcgagccatttgggtcgagttgaacagcctgaaggaagcagtttctggcggtgtcgatgtcacctagttcaacattgatttctccaagaaggttaatagcggggagctgtgcagtggtgttctcagcggtcaactccagagcctgctgtgctaccacgagtgcctcatcagctcgaccagtttgtaggaggattgtggcttggtcgagtaacgttgagggatcttgagccatgttgccttttgagattgagccaccagggccgagaacggacttttcgcggggtttggatgatttcttcttttgtggtctggactttcccatggcaggatgcagtaaaatttaataaataatggtgatgtcgtcgactagaatattaagcagagtgattgtcaattataacccacagggtatctgggagaagtaaaaaaaaagtgtacctccaaatttttggagcggctgtttgacaggtttgcatgtgggaccgcaatattgtaccatatcgtaatgataagtccagcatgtctacttgctattattcccatcgtccctgcacttactatagctaaccttggaatggtctattcttctagctattacacagagaagaacatagatgcatgaagaaagatgtttaaatttttttctaaaaagacttctcacaaccgtggttgtcgacatggagcattgccaccattgtgcaatctcactctacatgtagagatcaatcgccttctttctttctgtctagagctaaaatgactcaagtcggtttctttctgcctccccgctatccagtgggcgagcatatcaccttctcggagcccaatcacaccgaatggaccatgtcgctaggatctcccagcaaaactcccagaatgacgagtccgacgttgaagctgggtatggacccttgtacgccgttgcgatcttccgtgtcagcagggacttagatggccaacaggcctatatgctcgtctacctacaagttccccatcaaggaaccgagttcttcccacctaatgagcgagctaagcaggccgctgctagaggccactgcgaagtcgaagctatcaaggccttccacaaacaatattcgactattacacctgctctccttggaataaaagaggatgtccaggaccaacaaggggttatcccggggggcttcgccatccactttgtcttccaacgtgtcccaggatatcgtctctgggaagatcatgttatgcctaaacatagagcccagcctcatagattctttacagatttcaccgttcccgagcgagatcagattagagaatcgtttaataaagggtatcgcgagctgaataagctgggatgggtgccctactatccctcggcaactaaattgatctgggaccccattgcctcgaaattgtgagtctttttcatcgtgagcctaggttaggcttgtggctgattattgaattaggtactttgttgactttagagatgttcactaggcaggttctcacgatgaggatgttgttcctgatggcaacgataccctagaaccgaaagagatggccccgattgtacgttgggggatttggggcctcaccattccccctgataagcggcaagaacgagcagatctttctaagtggacgctctagccctgaagtactttgctgcctatgcgacgatgtagctcttgagtctttacaattccaatctttttcatatgtatcggagataatcacaatattacctcctacatagccaagtgattgctgttttatagctatcttcggggtttcttttccatttcaatgttagtgagcgggtcatggtgttcttgaagctggaagtcggcgagtttaatatattcacgtgaccgggcttggccccgacgttggttgcgacttggtttgcgctccgatctcttttttcccgagtttcttaatattgcgatatctcaaggtcttgcctagatagttttccaagctgtcccgctggaactactcttgtccgtgtccgcgctgtttcccgaagaatctgcactcccgcgctcaaattgttaccccgccggcggatcaacagctatgggtcgtgaagaccagattgaggagcgtgaagtgctcgattcaatcttccccgatgaaattagcggtaagtaatagacgaggcgcctagacggtttaaactttctttttatccttgctcacagcgagacctggcacctagacatatccgaaacctcgtaccgagtatccataactcttgatgccctcgaatatgacggcgatgaaacagaacaacctgtgatatgcctggaggtctcttacccggaggaataccccgatgttggcccgaatctcagcatctcgtcaccacccaatgcttcgaagcatcctcggctagatgtccaggaagaccgggacctactgatggagtctcttcagcccactatcgaggagaacttgggtatgccgatgatatttacactagtcagcgcacttaaggaaagcgcagagcttcttatgtccgagcgagcagacgccattcaagccgagatggaccaagtcgctgcgaagagagaggaggaggagaacagaaaattcaatggcacagcagtcactgtcaagtcattcttggagtggagtgccaagttcaaaaaggagcaggaggaggaggagcttcgcgtacgcgaagaaaaggaatcggaagacaagaagaaaaagcccacgaaagaggagaaaaaactcacaggccgacaattgtgggagaggggcttggtaaagggcgactatgatgaggaaggtgatgatgctctaccggctgttgagaagctcagtgtggccgcatgagctgatacatagaaatgttaatgacctgccattacttcatgaaattatgtattataacctttttgaattggtgtgattatactgagcgatcagtgaactagtatcaagggcaggcggagtaatatacagatctgcaagtccacatggacttacgttatggtacagggaaagataatgcccaatcagcagacaaaagaggagtggaagagatatattgtcgtggtttgagctgcttgctatagcccatggttcccattgatcggatatgatcaagaaacctggctaggttggcatggataatgtaacattcctttacaacaaacctttgtattctgatctcgggcgacattgacaagggcatggccatggataggcgactctgatgtggtcaggaatggacctagaatggccatatggttgaccaacatccgtctgcccaaagagctatgggaatgtaatttgggatagcgcggcaagacggaccactcagtctcattactttggctgcttttggctagcttcttcttctgccaaagccctttcagctagaacaatcttccacaggttatctgcaagctctttagattgcatgtcgaagtgtccgattttcgcattgacatcggcaatggcatttgcaggatgttcagaccaagtggatggctccttagtgttggtgacgcgatcccactcctcttcgtcctcggcgaaaagtagctctactttcagtctgtcacgacgttcaatccagttccaacgacgtgtaagttttgttcgtatcacactgctaacgtttctcggttgcggttttttaaagcgcaagaacggaagtccgcgtgcattgacaagtacagggacattgcgcttcttgtcacctaatggctggggtctgtttaggaccgagccggcgttcggatgtcgctgatttgtttcctcctggaagcgaatagacttttcttttcgggctttcttgggcgtaagaggtttgacagatggcgctactagtcgaatcttcctttgcatcgcagcatatttatctttttgtgacctagcttgtgctataagagttgtgatccgctgtgcatcatgttggttggtatgggacgaagagaggagatctagagcctatcatatgaaatatcaacatgagctcaaccaagatgaatattcgatgaacatacctcatagcctgccttcaaggcatttgctgtttgtgatgggctttgtaattttttatattttcggaaattctgccgaaccagcggtttggtctcacccagccacggattgtctgcagttagaggtcgacattgtcggagaagtgctcgatagagtgccaaacctatcagagacagactgtcagctggaagtgcgggaaacgtagggaaatatctctcacaagcaaaacgatgagctccgttatacttgggcaccagcactttatgcattctgccgtgttgaaggttatactaataatgaagctaaagctaagtcttatctcatttctaccggccatcaccgcctgctgtaatgagctagcagaccagattaactaataggtactgcccaagacacataccgccttgaaccaaaggcacgtgaccaaaattgggtatatatacccgcccgcgcccccagaatctcttcttcttttctttcttcttcagctctctttgcctattggcttagatcaagtgtagtatctgttcttttcagtttaatctctgaaagtttccgtccaggaaacactttgattattcctatttttggatctcgcgacttggcccctgtgcttgcacatgcctcgttgcacagtgtcattgggcttacactacccccgatcgacgcgaacacctttttcatcaactgctcggcttgtccgggcgcttggagaagaagatcatgtagaggtaaatactattctcttgggcctaggacagtgtcccctcggagttgtttgtctggcgtcgccctgtctacccccatgttgtgccttttcatttttttggcatttggctcttggatcatcttatcctgcctccttcctgaagccccaggtttttttgacctctcttcgacctttagtctaagcgttcgtccccttgaatccctcgatccctttgtcctgtccccatgtttggtctaatgttccccgaccctaagttgcttcatgctagatagctaggaatcacgcatggaaataaaatgaatcatttctatgtcattccataaatgaagtaatagtagttagttattcatttttttatagttatcggtgcgcctgacgcaatgcccagtccagtttcacgaaaaaaacactttagagatgaagacctaatgtagggatgaaaattgaaagttggggcccaaaataacccctgccgatgctttcatgcagagactgtacacgctctagggtcatagaagaagagaagaagccaggaaatttaaatgaagcccaccgtcacatatgctggactagaaagtcgagccctccgggggctgcggcagcttcttatgctggggcaaggccatgtacctggactaagtgtcaacaccaactatcgcatcctctacaattctttgtgctcaccttcttaactcaatcagaaccgtctccatagtgttgtctcgtttccactgcgcaagggtaggaagctttgtcggatcgacctgtagtacaatcacttagtacataatggcttcgtgttttggtacccactctcctcataccttgccagagctgggatcaacacaggggatgttgactcgagaaacgaattgaacggtaggcgggttatcggggtagtcaggtccgcagtggatgttcacactgtatatccggttctcatggacgctctaaaagcggcagattagcgatagtttaatggtggaatggagaagacccagaaactaacgtgaggcggaccaaggatggttccattccagttgctcatcatcatatcctccccatcagcaagtccgtatgagcaggcatctaataataagaaagatacgtcagtgatctaagatcggacattatcggggatcgtaggacaatcgtacctgcactcagacccttctcgcccttctcgagctcctccagaaggcgaaagtttcttgggaccttggcggccatgttgaacaccgagtagtggtttcggaggctggaaatatcacgacaagtgtgaacagatgccaaagagggatgttgcgacaagaggggcaatgcgctgggcggtcaagtgggatcatgatcacgtgcgatatggcttatcggtggcttggcacctgttggagatgccacgccttgttgatcccatcgtggaatcgttgtactagcagaattgcagtcgttgttcccttgctgctcacatgaacttggaattaaagctcaaagtttgccactagtctggtgtaggaacaccgatctgttcatctgcaatcgagagctccctatactgttgacgtcgggagtgctggccatgctttgatgcaacaaacctatatcagaaatgtcctcccaattcttgcagacggagctcgccaatttgatacatgagtctcgaaggaaaaactccgatttgcgaaatgttggttatcactctctaggcgtcatcggccatggcacactaacgagaaactaacaggccgctgaacaatcattgaatgagctcaaagcactgccctcaacttcagaggctcagatagcagcaggtaattttctatatggcaaccatttgtcagttttcaaccgctaaaacggcattagatcttgttcgcaaaccgaatttcgtcgagccattcatcattgcatgctatactcggcatgcgaagcttgccggtattggtgtgatctgtttacagagactaattgcatctcggtcattaccctcgagccgtttgaaggatgttctcgggggcctgaaggagacaacgagcttgagtaaatgaccaaataaatcaaagcctctaaattgcgctaacgctttctaggtcttgatatccaactgaagattctacaatctctgccttcgcttttgcaattttattccaatgaattgagcggggagcttcttgcgaatacgttggaaatatgcgccacattacaggcaagcaaaacgattgcagtctctagtactgccgcggctactctccaacagctggtggtatcgacctttgaaagagtttcgagcgaagacagccttccgaaggatgtcaaaatcaccacaaccatcaaagtcgatggtcagtcgctcgacatcggctacttcgcctatgatgcactgcaagtattggatgatctctgtcgtctgattgatggtgagccactacagtttctgcgaacacgaaccctacccccgacctttgtactcgaacttatcgagagtattctcttgaacagcggccgtctttttgtgggacatcccgaactttcgcaagtgctgcgcgttcggttgttaccactagccgtccgttgtctatctgagaggtattcattcgctcaaaccgtccgagtcgctcgaattcttctcattcttctgaagcgtcatatgtctctcttgcccacagaatgtgagatggcattgagtctgataacccatctcgttgaaccggatgggacagcgccttggaagagactactctgcatggaaatcttccgagggctatactcggagccgggtactgtgcggctgatctacactttgtatgacagtgaggaaggcagaaagaacatccttcgtgaccacatggcggcacttgttcggctagcttcggagaagccttcgttgattggtgtcagtaatcaatcaacggtaccttcacgtgcagagcactcaagatcaaccacagaggatcagataactcttgaaactggcggtgttgctggtgtcattggatcaactgttcctccaagtgaaaccaaggtgcctggaattagcactcagtggagtgttgttcgtacgccatatatcgatctcctcgacaagacggaaccgcccacaccgccggacacttacatttacagcctggtccttaattgtatcagcagctttgctgaagggctcgcgaaattcattcttccattaacggtcccggatctcaagcaaagacgcaagaatcgacttatgagccccgttcagggacccgactccgctagatcttctcaagattttccagcagaacccatgcgagcgcagtctagctcgtcatcgaaaaaatcacatgttcccatcaatcctctggacctgcagtctcatgtacagtactccgccatcaagacttgcgcggggataatagagaactgttggcctgctgtcctagcagcttgttccacctttttgcgcgcatctttagatgacgagtattaccataatcttgttcgagcattccaaaagctagctcatgtggcgggtcttctgagattatccgttccccgagatgctttcttaacaactcttggaaaggctgctacgcctgtgagtggtgccaagtcacacaatgtgtctgccaccggctcccagcaaagtgacacaccccaaaagaaacggagaagtgcggatctgtcaagtctggccagttctttatcactggagcctactgcggtggaaggtcctcctgtgtctttaagtacgagaaacctactttgtatgcgggctttgcttaacctcggaattgctttggggccgacattggatcagccggcctggtctattatttttgaaacacttcaatatactggactggtgattggcatgtcctcaagtgcaatggtcaaatcggctagcggtaccggggagaccccagtcaccccaggaaacgatgttccaactgccaatcttgggactgaggtgattgcggttcaggcggcttctaacaaaatgctcgaaagcaccagcgatttcccaagtgcatcttttgaagaaatattacttgccttgttgaatctgtcagcattcaccgaacagtgtcgcaacatgaatgatgccccaggagtatcagacatacctcgaacaccgcaatcaccccaggcaggtggacgcttgcaccaaggttcccggcgcgtatcgcatactgtcggaaaatcaagaatgcaagacgaggaactcaaatttgtattggagaaagcaaatgaactagccaaggcaaatcttgggagactgtcttcgctcgagaaagatgacagcaaagcatgggggctactgacgcaaagtctcatctctacttccgcaaatactaccgtcagtccgaatcttcgcctgcaggcaagcgcgattttgaactcgatcgtattctcaacaatgaaacaaagggacgaagacgatgagaaagtctacaatcaagtgcagacgaggaatctgcagacattgaaagcccaggtcgcctcgctctatgcatcggacatgcacacgtccaagtctttgccaataaccgtcattgaaatccacgaacagaccttggaagtgttaaataatattctggaacagtatgcagaaactttcgtggacggatggaacctcatctttgatttaatatctggtgtttttcaacatgccccagatcctggacctggcgatcggccttctactctgatagagcgcagatcatcggctcttccagcaggcccccggttggtacgtgctgcctataagtctttgcatcttgtcgcatccgacttcctttctctgctaccagcgccctgtctcttaagcttggtgaatgccttctctagctttacgtcgcaaacccaagatttcaatatctccctcaccaccacctcgtttttctggaacgtttcggactttctccaggcccaaattgagcaaatctcagttgaccatgttgatgcgtctgtcagcgaagaagaactagctaaactagcacataaccaagacccttctgtttcccggaactcgctgtggctgctgctgctgcttcgcatcgttgatatcacgacagacagtcgacctgagattcgaaacagtgcagtccatacgcttctacgcatcttcgacgcctatgggcagcagctctcccccggggcgtggcgtctgtgcctaaacatggttctcttcaagatggctgagggaattgagacccctctcctccaagcgaagaacaaccgaagcagtacaaaacctgatgacttcaaggcgtgggtggatacaacagtggtgatgatcaagggtttatcaactctgatcaagaatttcttcgagacccttgtgcacgacgagaagttcgatcaatcctggaagcgacttttgaagtacctgcaaagtctgattgacttgcatattttggatttcagcgaagcaacattttctagcctctctgcgatcctcctccgggtgcagaatggatgtgaacttagcaacgatgctcttgagtgtgcgtggcttctatgggcaaatggccaccctgctagcgacgagaaggcgcttgacttagatcaacctaaccaggacgcggctttggcttatctacatacattccaacagatctatcgtctttacaaagatcagttgagtacgggacacattgaaaacgtccttcatcatctcagtttgctggtgtggaactcggtctccccgcgctactctccagatattgatcgaccctcggccttgcaagcgctagtcattgattgtatcaaaacgctctgcctggagaaagaggactcccagccgaatattctcttgtgtcttgccgaattatccgattcagcattatccaagtggagccccggcagcgacactcgaagaccaggattcgtggccttctcgaaacgcactatcgatcttgtcagctggtacattgccgaattcggcatcaagcaaaacgtcttcatgaatggtgctcttgcaaaatcactcgaacacctcagtactctaattgcggaaaagtacacatggcaagggaaggatcgcgagccgttcctatggcaaaaggccacaacagtatctctgaacgttctgcaagtcgctgtcccctacgtggaaaagcaatacacgaaggcaaacgagtccgaaacatctcagttctggcaacatattgttagcattacaaacggaattgtttccgcccgtggcttccaaacccaacaactccccaacgcccgaatcctcacagacgaagcattcgacatcaaagccttcacccgcctgaagaccctcatcctcccatccctcggcgcagcagcaatcccggacgccgtccgccgcgatttcgcccgcgctctcttcaactcctccttcatctacgctcccctccgcttcgacctacccaccggcctcgaagacgcacccctacaggacttctataccgtccgccccggccgcaccttcgacccaccgccgaccctgcgcccgggaatagcctatgtccttatagacacgctcttcgagctcgccgcacactcgcaagccgagaccgagacaaaagccgacgctccatccccgcagactctgctcgcccgctcgatctcgccctatctccttctgcgctgcgcggtctcgctcaagtcttacattgcagaccagcctttgcgtggcttgatgccccaacccacgcctgcccgcaaggccctgctccatctgctcatccgcatggtcgagctgaagagtgagccgtcggctatcccggatccgccttcgctgaagaccatctcgggtatctcgggtgaggatccggaggagcatcactatcggaagcatctcgagtggatttatccgttggttgtgcgcgctgtgcaggttgctggcaaggagcgcgatgatgggcagattctccaggcgctggggaaggtgttgcaggaaattggtcggtttgagtattagagctaatctggctgggtgtgtaccatgtaggcgattaatgcattgttttattttatactctagacttcacattctctcggaccaacacatcagaagtggtcacattctacaacctgaatctaagatgaggttcgatttggaatgaggcttggcacaagtgtaggcagagtaaggtatactacaaagtgatatcgtgacatagccgtgagacaggatcaacggacacaaaaggaatagtgagtagtagagtaaggaaaaatcgagatcagagacaagaggcgggtatagaagaacagatccgcaggtaccaagagactgtaagaaagaagcgagcgataatgagaatagaataggatagtctatgctgctggcgcgggaacaggctgaggctcctgccgaagcgacggggtgacttctctgccgggcccagcggtagcagagcccggtggaagagcgggctgctgacgctgttgctcgaggagcatctgctgttggatctgctgctgctgtgcgatctgggcgttcggggcgatctcgggagcttggcggtagagcgcgatctcggattgtttgaagtagcggcgggcgtctgttgttgggttagttttgagattggcattgaggtgtaggccaatggtgtgtcaggaatgggaggagcgtatggtaaattgtatcggtggggttgccaggaccagaagtggtttagcgtgggggtatcgggttttgaggggcaaatcggcaacaaaattgacgcaactcgggccgacttggatagttgtattgggtaacttcaattgccgacggctattgcattccgtctctacaccccgcattctgggatgcgtcatggactgatttgaggattgccaagaacgggggaaagaaggaagaaagaataggtaattagagcgtaccttcgtcgatcagtacgagactgagatagtaccttgtcgagtacttcttgttaacgtcgcggaatgtcggcgtcaagtcaaatccaccaaggaatagacggattggaatagtttcacctgtgaaaagttagtcatgctcaagattaccccaaacttcccaactctcgcgggaataataaagccgcagagtggtggccgtggccaggcccagatatttcaggggtgttcactaacctctcgatggagagccgtccataatctgcgctcatgttagcattcttatggctcgtatttcatagccgatatcacttcgagtacgttcaacaaatcacatacctcaaagcgcaccaatgtctcactctcattatattggtttggcggggatccagttgtctctcgccgaatgatagacaattccatatgcttgatcttgagccgcacgagcaagaaatagatacggccgacaatcacatccttgagatgatacttggatttggagtattcgaattcgatatgcaggcagtcctcaataccgacgtccatcttgatagggctgttgttctcaggtggcatgcggtacgagtacacccacaagtccttctcccgaatgacgtccgccatgcgccgtgagacagtcacccggacaaagtagcgcagcttaacgttgatgccattgtaggactcgtattgcttttcgacgttcttgaaattgaaggggaaggtctgcgggtggaggagctcgccgggcgcagcgagttcttggaccagggaaaggaattcatagtggttgcctcggtcgtagaacatctctgtattccaaatggaaaggtgttagcgttcagcctgcgatggcgaattcaggagaggctggtaggttcgacgcaccaatcgtgccaataaattggaccttgatccccgtgtgttccagtcgcttgccatccttcggtctgatagtcacggcacccttgacggactcgccgtccatgtacagagggacccgctcgcggcggcctttgtcgagcttgacatcgacggtctggcgctcatcgagatcttcgaggaccacatcgatgtcgaccggggtggagaagaagagtgaagccatggtggaggtaattgaggctgcagctatcgaggcccgaaccaataagtcggagctttgatgatctggagcttgtcgcggtggcctggaggtagcttacgtaataccgcctccccgcgccgcccccatgaactgatattcgacatgtttttgtatagaactggtgattggagtataagatctgaatgaatacctatatacgatatttgatactcttttaatctcgagctccacttgatctccccgggtctacttctggacctgactaccaaaggttataccactgatctacaactgtccgttgtaacttggactcttcaggcatgtcggatccactggcctcccaacattcccatttcccattcccaccgattggacctgaagcggtcttcgctgtcttttgaacatccaagcacacaacttagccatacggatcagaacagcacaccttctaagccacgtcgaataagcaggagatcggatatgtcggaatccgcttcccgtcagtcagcttgctctcatgaccatagacaaaacaatcggaaaatcagtgaatagccaagcaaggatccgactcgttgaccccgccggaagctgcatgccttcttccccggattctgagggaaagtaatggcctggtcatgcttaccgggcataccaggcttacctgggtatagtcggtgtgactgttggaatcaccatgcatattatttgctcatgttttcgtgtcctatcggacgaggatatattctccggaatgtctcccctgtgttccacgggattgagaatcggcaatccgtgtatgatctttcaagatcgggtggatctgcgaatctggaagaatgtggggggccgtttctctgtcgatttactgtcgacttcctgtcgacttataggaagtgagagataaagaatcttgaaatgacgcaggtacggaatcttagcgagaaggcaaagttccacccaaagtcagagaggagtagaaactcgataggagaagaactatccaatctggcggctttctagcgtgggggtgagttactgtaataccaataccgaataccgtgacatcatgatatttaggtgtttgatggtgtagtcaattgatagttatagcgaagtataagcagagaagacataatcttacattctagaagcaatggctattcgcttttggatatagtcagaagaagacaccccaattagcctaatatccctcatgtcctatccctatactatccctattctccccctatcctgaaccccaaatataaaggaccaataaccgtacgaatgtcgtctcccccactcggcttctgcttgaatcttttcttacccgacccaccgtgatacaatataagtacttagaacaggctctttgatttctgaaattttatttcagatctgaaagacctgttatagaacacttttcccgggtatcactacagcgtcatatctccacctcgacccaagttattacactggaaatccaaatacatccctaaaacgaacagcactttcctttcctctacaacatgctctccgcaggagaacgaccacagcctccccaagctcccgccatagtagattccaccgcaagcaaggcgcgcatcatgccggacctcgccaacggcaccaacggaaccaacggagtgacgtccactacgccctccaaacccgcgaaacagcaacatatctgggtcgtgaccggtccagcagggtgcggaaaaagcaccgtgggcaacgtcctacgcaaggagcttggtattccatttctagaaggcgacgacgtaagtacccaagtacctgaatgcaccacaccctacactccacacacccacaaaccacccaattgcacccaaacccaacaatcacccaagtatacacaaataactaacacaaccctcagtaccaccccgcagccaacaaagaaaaaatgggcgaaggcatcccactcacagacgaagaccgctgggactggctgatctccctgcgccaagccgcaatcgacgtgctctccccttcgaaagccaacaacttccacccacccgacggcgtggtagtagcgtgctccgcgctgaagcagaagtaccgggatgtgatgcgcgttgctgcgtacggctcgccctcggtgcatattcacttcatctacctcaagctcaaggaggatgtgctgatggagcgcgtcgcccatcgcgaatcacactacatgaagagtggtatggtacactcgcagctggcggttcttgaggagcccaaggacgagtgggatgctattactatcaatgttgagggcacgatggaggaggtgcagcagaatgttattcatgctgttactgataagcttgctgagtataaatgattgtttctctctctctccctctccccctctctctatcgttggattgaagggagtgaattcatttgtgtacttggtggttcgtgcgaaaatgggtatgatctatgcatggaggatttagcattgtgtttctgtcgatttttgtgcctccacaatggtgtttggtgttttggccggcttggctatgtcaccggtctgttttagatctggagttcttgatgaagctcgcatctcgggtttttatttcctgctgtttgatatatcaattgtctgcttggcaggcttcgtgatatcctttgatcaattgctctgtctttatcttttacatctcagtgtctctatacaatgtactaagaagctcaatctataagtattgaagccagcaactagataaaccaagtatgcagtgtctttagatatacccgtaatttgttattatttagatataacgaactactttgtcaagactcgtctaattcacctgagatttagaagcataagctcgggcgactcaaccaggtccttaaccctgttacccattttggccattgtcgcaccgtcaatgacgcggtgatccgcgctccaactgaagttaaccatatctccgcgtgtcacctgtccatcgtcatcaaagacgggcacagctctagtcctacccacgccgagaatagccacctccgttggcacaagcaccggagctacgtatgtgcctccaatattgccgatgttcgacacggtgatcgtgccaccactgagatcagcggggctcagctttccgctcttcccaagggcactcagccgcgcgatctcagcagcaatgtcgaagatcgagcgactggcgacgtccttgatattcggaacaatcagaccattcggtgtatccatagcaattccgatattgtgcttggcgcgcatgactagcttcggctttgcggggtccgtggtatcgactttggagttgagaattgggaactcggtcagagcctgtgagacggccttgacgacgaaagggaggaaagtgattttggtaggatcgtgtttgtcaaaggcaattttcttgcggatggcattgatgccgttgattttgagttcgtctgcgtaaagaaagtgtggaatgttcagggatttggtcattgttttgaacatctgtgattggatcggagtcaggttgacaattgactctgcttgccgtgtgtccggtgacacggagactgaggtgggcactgatgttggaagcgctggagaatctctctctgctacaaacttcagtacatcctctttcatcacccgcccgtctttgccggttccgttgatttcgaggatgttcacgccgtgacttttcaatagcccgcgtactgcgggaactgcaagggatgcatgcttcgttttgggtgtctcatctaggactttggtagggggaggagttattagagaggattcggctgcttgagttgcagcttggatctcagaggccgaggtaggttcagacggcgctgcccttgattcgtgcgccgggttatcatcggggtattttccatccgcaacctcgatgtcgcagagtgcctatcgaagcctgttagtacgttgactgcagtctgactttcagacaagcaagagtgaaggtagtacatacccttcccgtaggtactgtatcgtctgtctcgaagtgtagtttcttgattacgccctcgtatctcgaagtaatctgggtttgttagtcgttaacccatagcagggaacgaaggaggcagcacccacatcatcgacagctttatccgactggtattggcacaaaggtttccattcctcaatatgagccccttcttctacgtaccattgaatgatctggacctcagtgatgcctggtaattgtaagtgaacaaattgaggaatgagttaggattatgaataaattaccctcgccgacgtccttgagaacttgtgatttgatctgccatagcagagagctggcatggaattttcgggacaagagcggaggtagggtggagcgaatgcggaggtgattctggggtagacaaggtctgaagttgcgggcagcaagtcccccactgcggctgaaacccattgtaaaaagggaacgtggtagagacagattcaagagaagttttctgaaattcctgaagagaaaaggagcattgtgtctattttatttggcattcgacactcgattgttctgcccgcacgccgacgctaaccgacgctacccacgtgatctccccgcatctatgcaagtatgggggaagtatggcattggcgttatctcatttctttgtatcttttcaaattgctagaaaactcttgttgcttggctctattgtgaagtaccaactcggaattgtcaagcaagtgaatatcactcaggttatatatggacagctaggcaatataagacgaagtagaccaagcaatctaccccagaaggcaattatatacgattagtagagagatttggagtaaatccatatggtacaaatgatggaattcagtctatttgactatagttaggtatagtaagccaaaatcctccctggatggctgagtgggtgagagacacgaggtcatctgtttgctgggtgaaacattgatcacgggtgataccgcattgggaaactcagcaatggtgaaactggtcagggtttcgatcctcgccaggagtagttggggtacggattctttttatatttttcttctttccttgtggtcgacagaccagcccaatacgagggtagcaccttccccatagggcaccttccaatgcccttacttgatatattgacatattggtttaggtatccatgggcaatgatgcaggtgatgctatctccgagatccactgctgtctatctcatgcaggtacggacattgggagttccaccgcagctttcagactccaccgaggatgttaccactctacccaaaattgagcttggagaaatataagattgctaacactgctatttggtttccaggccatgcttggcgggaaaacacaagggtgtacctagggaactaggtatctatcacgattgcaatgattcaacttgccctgtgagtcacccagatctggggtcgggtctcagccacaagcacgcccattcgtaatactctactaccggaagttctacttctgcaataaacaaggatatctcggagcttgcccgacttatgtccgcgtgtcaaatgtggagacgacatcaagatgatcgtcacaaccttaactcaatgcagaatccgaggccgacgctgcaaggtccgaaattcactagaccagacaccgaggcagtcaacgtggtacgtttattgcatgaaacgtttaattagttaataggtacgtacgtcaattgtgccgatcaagatgattacctaggtataagaacatcgtcggtcccccaactcctagtcttgtgcttcggaattccaattgcttcaatcttctgttttgcggtgatcccattatggctctcctgaccaagactctggtctcactggccttgggtgctgctgtcgcccaagctcagctttgggacaaggtcatccaaacctcttacggtcccgtcgaagggttccagtacttcaaccagtccaccctggataagtacttcgatggcgccgagtccaacgtcgccgctttcttgggtattcctttcgctgccgatacgggatatcagaaccggtggaaggcaccgcagccccgcgagtcatggaacaagaccttgaaggctacggactttggccctgcctgtcctagtaactcggcttccaatattagcgaagactgtctcagtctcaacatatggaccaacgcggagaccgctgatgccaaacttcctgtcatggtctggaaccaaggttccgacgaaaccagcaacaatgcgtggtactacggtggaggcatggccttgaagaatgtcattctcatcaccttcaaccgccgtgacgatgcattcggctatcttgctgcccctgagctcaatgaagagggctacaagctcactggccacaagacctctggtaactatggtatcttggatcaattggaagttctcaaatgggtgcagaagaatattgccaaatttggtggtgatcctgaccgcgtcactcttgctggtcaatctttcggctcttctcaggtctatcatgcagtcaatagccctctcttcacaggctacttccatggtggtatctcccagtccgggatcagatacccctacgataccatgctggctggcctcgccacctcatacgtcaacatgtctacggctatctccaatagcgctagctacatcaaggctcacaacgtttctacaattgaggagatgcgcacgctctccatggagagcttgttggttggttcttcggaccgcgttaccaacagctccatttggtgggtcaccgcactctccgccggttatcctctgatcttcaagcccgttctagacgactacgtgctcacatccaagtacattgaaacccttatcaatggccctgccaacgatgtccccgtgatcactggtaataccaaggacgaatctggtgcctctcccagtaccgactatactgttgccgagtacgagtactactgcggactcaagtacggaaacctatctagcaaatacttcaagctctacccagaccacaacaacggtaccattgcctctcgggcctggaacgctgctgcccgtgatctctctcttatcggctcttgggcctacgccactgcctggtacaagtctgccactgcgaacttctacacctactactggacccatgctcccccaagccaggaccaaggtgccttccaccaatctgagatcatgtatgcgctcggggctctgtacgccaattccgatacgtacgctttcaccgagatcgactttgagatccaggagaagatgtcgtcctactgggccaattttgcgaagactctcaaccccaacaatggtggctcctacaatggtagcaaatcgttgccgcattggagccccaacagtgccgagggtacccgggttgtcatggaactcggtaaccagtttgaaaatgtgcctattgcgaagccaaagcaggtggaattcatgatggactacttccaccagcaggttccctactagagagtctccctttagagtgacaagctctctagcaaacattagcccagtggttcaatgaatacctacatttacgtatgtagatatgtagtctatgtacactatgtttattgatgaagctagatccacggtatgcgtacaccgtaccaaggttattaagtcaatgacctcaatcagaataacccggagaatattggcaatattgaaccttcctctcattgtatacgatcccagacataatggcttcaatccaggtaaatgaaataagtgcgtacaatatataattgtgcggagtaagcctaggtatttcctaggtaactaactgaagtaccatattcatggaagatgccatagatgttcatgtcctgtccgcattagctagagccccctgagggccataataatactcacgtaagaacgataaacgcaagacctaacatagacacgaagccaagcttctttttcagctccccttggtgaccagatgggttgtccgagaaggaattttggaaaatactttgtgattccatgacctcctattctgtgatagctcttgaccacagtgcaaaggcagagagatcgtctgcaacaatatttacaagagagattcattccaagagagattccttgagcaagtaacggctcttgattttgggccgagttatgagatattgccaccgggtcaatagcctattcctcaaatgataaaccagccgtgacttcaagcacccttggttgcgatatgctttagtttgatcccagcaccttggggcaggcgaactgctgggaccaaccaggacggtttacaaggtatccatctatgcctccttttggtgtgtgtttgtggtgtacataacgctaggccgtagttagtttgactcggcccaagaaaattacgaaataggactgcttttgtcaatctccactccaaagttctccatcattagaacaaccaaagcaaaaacagggggagtaaattaccgagagcagagataaccgaatttcggcgaagcaagcgatagtggattcgacccaccctagagataggagttatctcgcggagaattgctcacccccgcatagaacttctactcccgaggtcgtcgaattcgccatggtatactttgaacgcgctatcttgtactgtgaggatcattgatgctactctcatagattacccgtgtgacatacagctttgatgtctcctcgacgtccctggtctaaatcggaagacgaaaaattgatcaagctcatcgggcagtttggggaccaacggggcagaaacagcaaatggcaagagatctccagaaatttacccgggagaacgaataaggtaggtcctcttcttttatgcatcgggctggcgtgccagagcatcgctgatatcaccatattcacaaggattgtcggaagcgttggtttcattctttagatccttctcttcgcaaaggacgctggacaaaggatgaagataggctcttgcttgatgcctatcaacgaattgggcctgcttggaaggatataggcaagtttttttctatccaatactcttacatgtccggcggctaagtgtacctctagcacttctcatcaaaggacgaaaggatgatcaatgtgcgaaaagatacaatgacatccttaatccccaagtgcaaaatcgtctcaaagtctggacacccgaggaagatcaatatttggcggccaaagtgaaacaactgggtcataaatggactgtcattgcagcaggcctacctggtcgtcctccgctgacctgccggaatcgatggagaaaactggccagaaatatctgtagtgacattggtttctctcaggaaaattcgccaatgccccaatcctctacggagaattcaaggacttcgccgtcgtctcagaactccgagatcttcatttcgtctcctgacgcatcgtctgaccccaccactatcgacctcctagatgccagagaggcatctaccgctctgccttctgattcttcccttttagatcttaccatgaatcagttagattggattgactgccttctttcaacccccacgaatatgtttctgagcccacaaccatctctacaatcacactatcaagttcctgggattacagatccttcattcacacccgcgaatgacaggtctccagatccacaaacagtcttgggaaatactctcgacggcgattctacagtcatacatcaagcctgtggcagcgcacatcaaatacatccgcctctgactcattccatgccaagcagcgaattagaggaagcctctgttcagcaagcaatatcttcatttattcaggacccaacttcagaaatgcataatcctgctgctggcagtatgcaacaccaggagcaccaccatattcatcatgttcatattcatcatcatcatcactatcatcaccattaaaacttttttgaatggtcaatctcagccatgatcaaacgtaaccttattgcatgaatcaagtgctcaattgcatttagctcttcatacctaagtctctcttatatatgaaaagcatggaatatacctgctcttgagaagcactttgtttctaggtgaggaaatggtaatattaactgatgaatgcagcccatcggggaagttgatgctacacaaagtctatttatgcagtcagaatttagtgtaactcgtcgatatttttttattggcttgagcagctcaggattctaccaacaggttaaagcagaaagttgtaatgtagtataaccatctacagaatgaagacgagaaagttaccaaaatcaaagatgatgaagtgtaggattgatggaaggtgaagatctagctactgtcatgaagctctctatatagctccatgctacaaagccgcaagatctcatcctctagcaaccagaagaagcatctctgcaggctcatataaagccaataccaacacagcaagctatctacagaggagtgaaagaaagggaaaggaatgccaaagaaaggtctaaaactgcatagtgcgatggtgagcttgtccaactgcgtcaagttgccggaaagaaattcaacaaaacagataattgcagagcgaagcgtcctcttctattgaaatcgaaaggaagatagtggacaaagtatcataaatggcttttgcagcaatcagtggccttgttttgttcttgagtctgagctggcgacaaggactgagtcggcgcttgataagcgacactctggttggccaactgattcgaaggcggcacgtcgttggtggggttgtatagggcaaagttgtagggcttaagatgcacctgagcgatttcagctggcatgatggggaagtcctcaacacgagggttatgcgtgaacccgaaagtatgccatatgacaatgtcctcatttcgcacactatcacgggcctcaagccacgacttgatgccggtacccccaagtgattggttggtgtaatcaccggccgggaatagctgccgatccttgtacttggtaacccagatggaatgctcacagaactcagatcggcgccagtgccagctaccgggtctggctagaagtaactagagtaagatcctaattagtagtcatagatatttaaagctgtccagtatcaaacttacctgagaccgaataggaacgagtttatatccgatcggggtcaatgagatcgggttctgcagtccttcatttaggatcttgaatactctacccttggaaaagtcgtcttcaacagggccagcacgatccagaatcttctcctcagtgacgtagcccgtaccaagagggttcaggtcatcgtcccacgggatcggaacagagtcagtcgacgcaaaactgttcgaatgacccccaacagcaggatcgatacgaatgttgaacaagtgttgatggtaaggagccatgacaccatcagcgacgcgagtgccccacgggacctttgcatccttatcaatcggctgagtagatagaattccagtggcgcgggtctcgaaggtgatttctccagactgatcaaaataccacatgtagatatattcgtagttggcgacggtaatgatagtctgcaggaccaactgacgcttccgcaccaccgtggcttttcctgtgcggtggttcgtgtgcttccactgaattccattgtcgatttcgtgcaagcagatagaattgggccgaagggcaggactgccatcagcagccacaacacagccatcgaaatacttgatcacgccgaggcagtcgcagccaagttgtagattgtttgccgtgacaccagcacccacattgccgagatcgaaagcgcccttgcggtagataggatttcgagggtcaccgtacggaacaaacatctctgaaagcgaaagccgatagaaggcgctcttgccatcaaatgagagatcgtgaagggttaagccttcacgccagttgaaacccacgcggaaacgccatttttcccactcgacaagctggcccatgacagtaaacgaagcaccttcgggttgcaagacctggtaaggcttcagggttgtacgaggagggttcttctgcaatcggtggtcgtattcgggctcgacgggttgggtacgacggtgtggaacagatgagccgacgggagtcgcggcttgatcacttcctagtggcagacggacgatcttctcgacttgcatagtgcagagattcacaatcaccatgaaatccaaagggaaacagtagtggtttgaatccggatcattgttctcggggtttcgcatgtacatgaaaacctaacgcggattgttgagtcaaaaaaagcttttgttgagactatagaccctgtcaaaacttacctgagtatggcgagtctgggtatcctcgccatcaactccatagtcccagggatcgaggaccacagtggtgtcgtcgatcttgagtctttggatttccgctttcacgcgtggatcggccatggtgacttgggcagcctcgttcatctcggatctgtcaacaggtccatggaagtctcgcgggagctcaacatgatgaacaaactgcttgttggtgacatcgacaatggcctcgaaaaggcgaggagatctcttgatataccagatgaggaatatgcaacgaggaatcgctgggagtggctgactgttgtgctcggcctccaaaaacttgacaagtatatccttcggtggctcttcgaggcctgcagccttgaagtgcagatctacaccttggtagctgcctttgaccaagtccgtagcaagttgaatctcttcgggaagagcggggtcaaggggatgagtggccatgatgacgaacaagcagagaatcgaagaaagaaaggttgaatggctgcagtgggtagaggaatggccgcatttttatcttaaccagcttcgcgagccgagtcaggtccatactccgctccgatcgtgtgtcaacgactgggtactatctatcgtctatggtgcgatgatacggggccatactcaaatggccctccacattatgccttggtggtcaaggatctgtgaattcttctagcataggccgagtcataatcagaaattcttcgacctcattcgttgaagaatccctgtccacttccgatcccgttctatgatttgtatgattgtggaaagttacctatccaaaatttatccgttaagggtgtaactgatcctgtcaggaattagccacttgcttacttcatgatatgaacaacactggacaaaccccagactgaagtccatcgggacacattccccaaaaaagtcctgagcacggcgtctgcgtgatatcgcgtgcacggccccttcctgactcggcccagtgccccacggtcaaacagaggtatatgtgcacgcctacacactccaccagcgaccaactgccaagtcgcgaaaagaagactcattcaccgagcccggtctgggcgatccagagggcgaattcccatccaaatggctctacggaaaagatcaactaaatgtgttcctggcctccgacctcgatttgctcgtgataatccttcctcaaacgcgtgacatgtgtggcatacttgaccgggagcaattcgcccttttcagcaagaggagggcctacgtgagtaaccccggtaggggcgcagtcatcaacacaaacgaactcattgaagcactggagtcgagtaagatccgtggagcagccctcgatgtcactgaccccgagcctttgccggctgaccacaagttgtggaaatacaataattttaccatcacgcctcactgcgctggaaactcgaaccactacactgaacgcgttctcaagatactggcgtacaatttggtaagacgagcgcagaacaaggaggttgtcaacagagtcaaaagtctttaagtctttaggatactagcttggcttcttgtcaggttttctttatcttagtgaagatctgaatagctttttcaatgatatgacgcttttaggaaacatacttcaattacaaaaactgaaccccacagctcaccgaaacccccattgaacactataccaatcaacatccatcaaaacaagccgtgacatattttgtaagatttcgaaaatactgatattgtctgttacctccgagcattcacatgggccgagtcgaacctgggatgactctgtccaatttctgtggcgaaaaagggcgaacgccggcctagaacatgaagaacgagggggcattgctcaaccctacgttatctaggccatgtggaatcttcaaagcttactccttcagattcaaagccgtccagtcgaagtcgatccatgccaatttgatattggaagcctaggtaaaaccagatagcatcaaaattgatgcaaggagccggcctccagtgctcaacgttccacctataatagcacgccaattgtgcagactaatttaatcacagcctccaccctcatctaggggtgtacagatataccccggtttctttacaggttgtgacgagacgttatgaagacgaaaaatgcctggtaatgataatagcgatacgtttgagatccagccgcgaacttgcctctgttatcaaatctgtcgatgtcgatctgtcgtatttaggccagatgactatatttcggtgtatgttgatgaggtatatgacattaagtgtgatcacgcattcactctctactgcgtttcgcccgtattttcttcgatatgtggctctatttctacgtagttctcggagttcagctcgcgagatatatctcatgtcagacccatgctctctgagaaagatagccttggtgcaagtgtggaatctgacttggcgcggggaaatcgaaatgccctaggaatacttatctcctgggtttattggattgcttcctcgggaatcctgaggttgcttatcattggctttgatctaatctgctagtgcctattcacgtatcccacctatcttgaaccttagcccgggccgagtcagtcagtttgcaggccttgctacctaattgattacactcaagcgctagtcgagtgtttctagtcagacttccaattgtataagggcttactatatatcagagaaacgcggcaaactaattcgcatctacgcagaacacccacaactccttactcaaccctcgaacaagacagagtccagactaccagtcgaaatatctatcaatatggctgatacgagccaaaacaatccaaaagatgtcaaagtgagccaggatgagcccaaagatatccaagggaccgtggaagaaggcgagatcagcaatggtcacttaagccgttcactttcacagcgacatttggtaagtagtttgctctcgaggctaactctccaactcaccatcaccccttcccaaatatgctgaattgaggtgtctgattttgacagatgatgatggccatcggtggtgtaattggacccggatattttgtgggaatgggaaccggcctatctaccgcaggaccagccggcctccttatttgtttctctgtcgttggaattctcctttggtttgtgatgcaatcacttggtgaattaggcgcctttatctcagtatcaggctcgttcacccattacagctccaggtttattgatccagcgtggggattcgctctgggctggaactacttctttctatggaccggtatcataatggcagaatacagtgcgtaaatcacaatcgaggacatttgctaacgctgtgaatactgtcattctaacaaaagcatcattgcagataacctcggattgattttaacatactgggatacatcgatgcctcgctggggctggactttggtcttttggtcaatactgcccccaaagcccaatgaaaataaatttgaagctaacctcctcttagggtttttttcatgtctttcgctttacttggtgtatgggcctttggtgaagcggaattctggctcgcattgctcaaggtactggctattgcaatatttttcctatgtgctattctgatctcctctggggtcattggtggccaaaagattggattcaaatactatgaagacccaggtccatttacaaatggggtgaaaggagtcttcgaaattttcgtttttgcggctctccaatacagtggcaccgaaatgatcggcctcacagcgggggaatctcaaaaccccaacaaggacattccaaaggcagtgaaaagcattatttggcgcatcgttgtcatctttctgggagggattttcttccttacaatcacagtcccatccaatgacccaaatctgctaagcgaaagcagtaaaacggctagctcacccttcgtcatcgcgttcaaccatgtaggggcaaaaaaaggtgctgatgctgtcaatgctgtcatcctactcaccatattctcagcagtgaacagtgctgtttatgtggggtcaaggactctgtatggactggccaaagaaggtgctgctcctaagatgttcctttacactgttcgaggcggcgttccgatagtggctttggttttcttccacctactcggattcctctcatttctcaatctgtcctctagtgcaggcgtggtgtacacctgggttatttcaatgacaggggttgcgacattcattacatgtcagtcttatattacatcccatgtcatccagagttctcttgctgatataacatgcttgaatagggggttcgatttgtttatgccacatacgcattcgcaaggcgatgcggcttcagaacgtttctgcgtctattttgccttaccaagcacagttttggccatatggtgcttatctaggatttggaatctcggtctttttcattttttttcaaggatggacatcgtttgcgccttggagcgtgcagaaattttttatgaattatgtcattgtcgtcgttttcattttcctcgccatatcgtggaaattctggcataaaacgagctgggtccaactgaacacggtggatttgatgagtggacggcgacacattggttgatgaagatagaacataccttcaacagtcctggattctctcatagcgccgatcacatccaccaatacaactcttttgacaatcaatcaaagttctatgaaccggatgcagtctcgctagttgcgcttcttccaaacagaagcaagaactcagttcgtactccataaaaccacccagaatagtaccatggggattcgcaaatcagaaagacgaagagtacttttcaacaaggaaaaagtcaaaacctgatagtcagtgtttatattgtcatcgctgtactttacttggtataagatgtcgctaccgtctaaagaagcgggggcaaacaaaaaggtgatgttgatggacgtaagtcaaaaaagcacctagaacctgaaattggcatacagaagtattgaacaattgattgctgaggtgaatcactctaaagaaacattgctgcaaatatagccaagggttcatttcgatgactctgagcttatgggaaccattttagccaagcactcggtcgtcgatagagattttcaatgccgagacgaactttagaaattccaaattcgactcccaagggtttctcctgaacctgtgcacgcacccaatcagccgtgatgcagtctctcgggctattttcgagtatccgaactgaatatccctgctaggcggcgttcccgtcggcaggtgttgatagaaagatatggatttttgtgttgctattagtgcgttattcttgttgcaatgccgttacaattccaagttttttttggcactatagagggatcaggctgatagtgttgaggtatcctgcgtgtagttatgcgagaagaggaagagagttgagattcccatgtaatgttacgacctgaaagatcagcggttacttcctatgattgttgaggagttccttcctgaccgaggagaagaacgttcttccctattgtgtaaaagggctaagcgaacgtattaagaattagggatttgcatatgtcaataaccaagattgttaccattgtgctaccattgcaacgattttgtattatatcgcagactgcaagcaagaatgctgatatggtgaattcttaaagctgcaatctaacagtgaactatcgacgcggataagacatgtatgattattattttctcttcggtagtcaacggtctaagttgattgttttaaatgaatagtatcggcttgcggtatgcgtggcagccgatgttctaccggagggtttcggactcataaaagagaaaaaaaccatatagatgatatattcctagacacatcatcattggaatgaaagatcaaacttccccttaggcattccttgactggccgtgacgttcttcaaccaaaacaagcccccaccttcattcaaagggtccccttctctgccgtcattcctagcactggtgactatgatttcattcatatcctggccaacccaagctccgtgtgtgactcggaaagcgttcaactcccatttttgaatgaactggcctctggggttgtatttttcaacaacagatccattccaaatgaaggtgaaaacgttccaatcgccgtcaacaatcagaccgtcaggttcgccagtttgcccacgtcgatcaatatggactcgttgatttttgatctctgcggtagttgaatcaaagtcgtacgcccagattatttgacgaaacgaatcggtgtggaacatgaccttgtgatcggatgtccagcctatcccatttgaacagactaccccttcatgttggattatgtggagagtctgatctggatcgtatcgatacaggccgccggtcggaacatatccttgtggaatttcgggacgcttcgaatcactggaacaacgagttaaataaaagcgaattgcataaggaagggaggggactcacgatccatcaagccagatatcaagagagccgaaccacaatcgccccatacaatccactgcactatcattcagccttgtcgtctttctatcatcaactttgatgaccttcaccaattctgtccagctcccatcatctcccagcatagcaagtgagttgaaggtgcagaggatgtatccgccttgtcggcaaaaattcatggaagccacagcctcagggaggttgatcgtcctccttgaatacggtatgcacgataggtcaagaacatgaatcgcatagccgagcacgtcgatgtagtggagcgtgttatcggacttcctgaatagaggactttcgcctagttcagtgtgtggctcaaggaatgccttgatggtctccatgctcgatatgctcgacaaactaagatgagttcagatttgtactgtgtatggcatttgaaaggcagcacgctgggatgagaaaagctatgtatagtacttgatagataaactccatggaatggggaagaaccgagtctggaacaggttacgggaccgcagtgctgactcggccctcatcggccccataattaatcaagctcgggagacatcattggtcagaattcacagatgtctttgctgattggctgacgcttatactctactttcgagtgactcttcttaaaaggtattgttatatatgataagcggtcggtgaaaagacaggtaaagaaatggtaacagccttggtttccgacgactatcactagtccgtttccggtattatctgggaaggagctatggactgttcttgtcgtattggaaggaaacgctcttttctgacacgcaagcgagataaaagtatatctaattttgtagggtttgtcgaaggacacacaaaaccgtgctctttgaatcctcgcttgtattttcttctcttcctcttcttcgtactcattgtttcgttagaaatgcagtctcaagcctgacaagatctagtatgtaacataacaataagtagttaccactttcaaatttaaaccttcaaaaccatacgattgtacggacctttattacgccctaggcctgcttcacccctacaacctgttacttagtaccgtagagctaaattgcgatcaatcaatcaatcagtcaaagttcgatttgttacgtgccaggtcttatagaacagaagagtgcatttctaacgaaacaataagtacgaagaagagaaagagaagaaaagaccaacgattattcgagatatttggttttgtacgcctcttgccaaatcatggaatctctaatgcgctggcttagctcgcttgcgtagcagaaagaaacgttcccttcttacatgggaaagaacgacccatcgatcttccagatcgtgaaaaccccaagtagtcctgtataaaaaggaaactatcaaaagaaatcaaaaatttgacggccatgagttgctattatgacatctgaatgctcagaaaggtcatggtctatcgaaaggtgtctcgctgcatcctttgcgagcttcttggaaggctttctcccgggcctccgaaagatacgccagagacccacggtcttttggtgacgggccatctggggtaggattgatattgaagttgaagatctgagttggtattccaacagaaacattcgcagtcggaatattgggcactgctaaaacttttgtttcaaccggagcagtagccagtagtgtgtaggcctgctcatgggagtatccgaagcgctgcagatagtccatagcgtgggtagcagcttggatgtatgaagtcgtcaaatcactgcgtttctgattgccttttttgtccactgagatgccatgaaaagcgagttgttggcggtacaatggctcggcaggactgggcaccacaatgggacagctcaatcctagtttctccattccacccggaaaaaccgagcatttgagcgtggcaataccggccatctcaatggcacatgtgggctcgccatcaccttgagaaaaatggagatccccgacggagagattcgctcccgggacgtagacagggaggtaaattcgagagccgccggtaaggcttccggcgtcgatattgccaccatgttcacgggcgggctttgttcttgcaccctctgttttgatcttgttcaaaaggttctctggaagcttttgtcccacaaaaaccccgttctcgacaggcatctgtgcacagaccactccgtggttttcgtggttttcgttgagggccccttctcgttctgaccaacgttgcagcagctcatgggaaggtgcagtgccgattactccacactgtggtctcccacaaaaggagacatcctttatatggcgagaagatgccattttcccatggaagtcccaaatactcttggccactcttgtttgaggctggtcaagaggcccaagtccgggatcaataagagagaacccccacattcggtctgggaatggctggacctctaaaatgtcaatgcagagcacatctccgggttgagcattggcaagaccccttacttatgttatgcggtcttcatatctgaaaatgtggcgctttggatgatgctcacgtataaaagaagccgggaatccccgtaccacccttccatgactcgacgcatcgaaatatcctaagattcttcaatattcattacctattctcttcgtcatgtcaaaggacaccaaacatccgtcagactccattgatacctcgcctgtcgatgactttcccgaaagaaacacgactttgggtgatctggagcatatgttgagagaccagcaatacttcagtcagagctacggtagacctggaatcaagtcttttgtgaagtcgcctgtcgttgtgctctgctcctgggcagcagctgtctgcgggtttctgtacggatacgaccaggggctcatcaatgtgactctgatcatcgatgattttctcaactcattcccggaggtaaatccagaacaatcacccagagcggctttctacaagggcttggtcacagcaatatttgaattgggtgcggtagtcggagctttgcaatccgcaatcttttgtgatcgcatctctcgtcgatatactatcatcgtggcggtgttttggtaccttgttggcagtgccctgcaagctggtgcagtgaattacacgatgttggtatttggacgcctgattgggggagtgggcgttggtagagcatcgatgattgcgccgctgtatatttcagaaattgctccaccgcacatccgtggggctctttacactctgcagcagtggatgctgattctgggaattgtatctgcatactataccacttacggtgctcggcatatttctggccattggtcttggcggaccgcatttgtcgctcaaatgcttcctggtacggttttgctaggaatcgtcttggtgttgcccttctctcctcgctggctgggcattaaagggagagaccaagaatgccttgaaactttgtcaaaacttcgttgccttccggagagtgatgcaaggattcaggcggagtggattaacatccgatgcgacattttactccaacaacgtctcaacggacgctggcgagagcactcgaccggaggttcttccttttggcagcaatgcaaagttgaggggcgaaaatggggaaactgtgtttcatcgcgatacatcaaacgcatttatatagggattgttctcaacgctttccaacaatgggttggtgtcaatggtttcacatattattcaaccactctttttgcgcagcttggttacgactatgagcagcgacttactttatcgggactcctttcgattgttcaactcattgggtccactgttccggtgttcattatcgatcgtatcggtaggagaccgctcctgcttttcggaacattcatgttgatgtcatgtcatatcatcaattccgtgatcgttggaatctcctatacggactggccagggcaccaggccagcgctaaagctggaacagcattcatgttccttttcatgttcttttttgaaacctcctggggtcccattgcctggggccttccaagtgagatccttccatctatcgtccgcgctgagggaatggcactcagtacggcatctaactggttgagcaactttgtcgtcgggcttatagtaccatctttggtcgctgccgccccctacggatcgttcgcactcttctcctgcacttctctgtgtgctttgatctgggtgttcttctttgtacccgagacaaagggaacaagcttggagggcctaagtcttctattcaaggacaatgtttatgaagaggaagcagctcaacgaaacgaactcatatcagaattgatccgaacgcatgctcccctgggacaatctgaaaagtaataggtcattttgtccaaacaagtcatggcaagcgttgatttatgactcccacagttccacagtagggaaatctatcacaactgtctgtatgatggcccgtcatgtgactctacggatcgtttgcttatttgcttgtttgcttgctaatctgcttgctcttcgtttgctatttttttattacggagcgaagcgaagcaattatatattttctttctttattcatacatgtcaaaccccaagaatgttaccattgctttgtatatcttttttacagaccgcttatgtgacatttatgtatccattttgcttcctaattgtgcccaaccaagttgtcaattttggaccgttgttagttcagtgagcaaaagatcttgagtgaaaatcgtggcaacgttattccacaagctaccgagtggcctcctctatccaaaacgcatccagaaattagcatttagtcaattcaaccacccaccatgctaccaatacgcccccgaagctctagaaatccaatagagcaagagggtaggatcttattagccatataggcttttaagaatcaagaaatatcctcaatttgtcaagtggcgcgccattttgctataccccgtacacctttcctggctttggacctccgcatgggtccctaccctggaacctccaaccgcccattaaactctagaggttcggtaaggttcaacctcggaggcgaaacaaccaggatcgaccgccaaattgatgacgctggcctttcgttaaggggacaatggtcaagagttctggtgaacaactacatttggatggggctagcgtggtgcattttattgaggtgagctgctgacttagctgctccccgcgctttgctccagtgagcacctgagcaattcagagcgctcagatgatgcccagtgagcgagcctgctgagtatggaacactcaggagcgtgctcagctgtacccagtgagcaaaaagcggcaaggtctgagcactataacggaaagagaaagccaagaagtggcagaggaaatcaaggcgcgacactaattgcctagatcgtacatcgcacatcgtactccgcacagatcttggaaatctccgctttgtcttacgatcgagatgtcctcgcgaatcagccttatgtgccaagaacaagggctcccctatcggagaccatccgctgatccctagtcgaggggtaacccactccagtctcagctcttcaggcagccaatttcaatccatatcgagacgaatcctttgcacagggacttgcgctgataccaatttcatctctgccaattgccaattcaccatggttgccgagtacctcactatccgcaacaacacctccactccacttgtcctgaagcgcattgagcgcttccaggcaccggagaaagttgcgttctatgccttcagtacaatggctagaaacgtcacccaggtcttgaccaaccaaacccgcagcctcgaggtctccccaatcgaacaggacagccgtcccttcgaggaaaagaatgttgacattaaactggagccattcgcactgaagaagaccgagctacgcgcctttgtcaactccgaaaaggagcgcatgcgtctactcttcgaagtcgaaggccacaaataccaaatccaagtcccggtaccaacaaaagagtccgcagaaatgaaagcgctaagcgagaaccccaaacaccgctttaccggcgtttccgtggccccagaatccttattggcaatattctcgtccgcaaacctgaacgcctggatgcgcgagctccgcgacgacatcctcgtctctgcgctctcaatcccaggcacgcacaactcgcccacatgttacatcgcgccgccctcggtgcgctgccaggctgtgagcccgaaagagcaactcgagaacggcgtgcgattcttcgacatccgcgtgcagccgcagtacccggatgacgcggcgcgcgacgagctgattctcgtacacagtgtgttccccgtctcgctgacgggaaacaagtacttccgcgacctgatgcgtgaagtcgacgggttcctcgaacgcaacccgtccgagacgctgatcgtctccgttaagcgggagggaaccggtaacgcgactgacgagcatgtgtcgcgcatcctgcacgaccactacgctaaggcgggcagtcggtggtgggtggggcccaagatcccgacgctaggtgaggcgcgtggtaaggttattcttatgcgtcggtttggattgcagcagaagctgaaggacgcgcacggtgggcatggttggggtattgatgctgctgagtgggaggacaatacccccaacgctaagtgccccagtggccagctctgcatccaggatttctacgaggtgctggagagtatgaatatcgagcaaaagattaagttcgtcgcagagcagattgatcgggctagctgctgtcgctatccgtttggcgttcagcccgatatgcatgcgacaaaggcattccccttttacgtcaattttttgagtgccagtaacttctggaagacgaatacttggcccgagaagattgctgctaaggtcaacccagctaccgtgcattatatctgtcgccgaggtaaagagcatgatgccgactgctcgacgggtattcttgttacggactgggttggtttgaatggagattgggatcttgtgcgctgcgttgtgggcatgaatgccaaactgcgtttgagacaggattagatgataaacatcgtttacatacatccggaggttaggaggaaatttgtcttttaggcgcggcatgcagggaatgcaatgattcatgggttaaacagagaatatgatgcactaaagttgatttcttacaagtatacattgaccctgaagtaggaagcgggggtcttgacgaaacgcagaatatcatctattatacaggaaaatgaatcagaatgatcatgaccagattaggacgattcgctcttgtcgccctccggtcccttctgctcttcttccaacacactccggcggctctccaaggtaaagtagatgctcttgccggctccctccaaagtagttgcaacgctagagctcatgctctgcaaggccatgacaagctgggagcggagaccgtccatgccaccctcgatgctgccgacccacttggtctgatcgatatcaaacacctggttgtccacacgggcagccagcaagttaatcttgctgagaccgttctgaacaatgggctcgtggtattccgggttcgccttgcgggtaggggccttgaagccggattccttgggggcaaggattgacagcgccgccttcatgtgttcaggcgagacgctaggaatggaaaggatagcaacagggccgacgagcagaggagaaagctcgtgcatgcccttcatgtttttcaccgcctcgtaggcagtgcgagacaagtcgtgtgtcaaggccgggtcgtcctttgagccggagagcgcagggatctcggcagaggtttgtgtcacggggtcaactgcacttggggggtttcctgcacccagagaagcctcgctgggtcggaagtactcgacaattcgcagagccgcctcaaagatgctggtctggatagtctggatcttaatgtaaggagcgagggcaggcgctgtccggccttcggcggcaatcttctcatccactttttgcagggcaagggttagttctcgtcggatggcggcccattccatggacttgaggttgttgtgttggaacagcacaatgagaggagatgtgcggagaagggaggtgtacgaccgtaggagctgcgaccggcggtattcgggattgcggtgcgacggtggctgagtaggagggaaccttgatacaggagctggtgagcgtgtcatctgctcaattgaagcagctggcgtgaatgctggggccgcagcactggatgcgctcctgataattcggagttcatattggcatcgagggatttgttgaagcgacgagattcttaaccgaggcggcattgtgattgttttaggtggtgaatttaccaatgcccaggaaattcaagaagttgatatacacaggtcaagataggtcgagacaagccccgggaaatgatatttttagggtcccaaaagggtaaagcgcttcggaggcggtgatgtatattgccgcctatatcgggctctcattgagtcacttgttatgatcttgcaggtatctttttaagcttgtggaacctcattgggattgctaggccactgtaaacatacagtcgcttacaaagatttcaagtatggcgacatctacatcctctccttctcagcggccggagtccatttcgatcgccccgctcctccagcgactcgcctaccccgccgctgccggtattcgagtcagcgcacaagatctcccagctgtgagtgcagaggagattgcttctgcctttgcactaatcttcgaggaccggctatctcaaattcaaaccgctgccctcctcacattgctccactcaaccggcaaggatagacaggcagatgtgattgcgaaatgttctcaatgcatgcgcgaggctgcttgccaagttgagaaaggtccgcttacgaagattatcaagtctcgtaatctgaaagcaggaaattaccagggtggattggtatgcgcatatgcacactccgtccattttgtcattgaggtatattgacagaccgcgatgtatagtgtgatattgttggaactggaggagattctcactcaacctttaacatttccacgacctcctcaatagttgcgtctcctcttctcatgacagctaaacatggcaaccgcgctcaaacatcgacctccggggccgccgatgtcctcaacgccatccagccattggcacccaagatcgcagccatcaccgctgacaacctggcccaggtctacgagaaaaccaactactcgttcttgtttgctccgaatttccacccgggcatgatgcattccaaccctgtccgcagggctctcggtctccgaacgattttcaacctgatgggccctttggcaaaccccgttgactgggcactggaagcgcgcgtagttggtgtggcataccagagccttggcccggtatttgccgaggccttcaaacaaagtggagcgaagaaagccatgattgtttgcggtgcagaggacatggacgaaatcagctgcgctggaaagacaaactgctggaggctctctgagtacccgaaccctgcatacaaagcatcagaagacgatgcagatgactcgagtgatgatgataccgacaatcctcgtacactcgtcaagatcgacaccttccagcttcagccatcggactttggcctctctactcatcccctcagtgatgtgggcggaggtaaaatgcccaagcaaaacgcggaaaagctgatgagcatacttcgaaatgagcttccacgggatgaccccatcttggagtttgtcctcatgaatgttgctggtctgcttgtcacctcgggaatttgcgaggcagataccagcaacatgggacctggcgatgatggtcaggtcatcaccgagcgtggccctgccggtggccgctggaaagaaggcgtgcgtcgcgcacgctgggcaatcgagagcgggcagtctctgaagcatttggagcaattcattgaagtaactaaccagctctgaagtaggattttgtgaaacttaggtagttgtaggcttggatttagaatgccttttcgggtctaagaagctttcggatttggggtatgcaattgtttcacctgttctgatgggtgagctgaatgtacctagatatttcgggtctatgagtgaatgtcattgaatctctgaaagcagatatgattggtttttttttagaaaaaagagcttaagcctgtcctccatacactagaggacatggccagaatatagtatctgttttgtacactgggaccatagaaaaaaccagtttgtgtcattcaacaccaaagcgccattgtatgcataattcgtcaaaagataaagatgtcaaaaccagaggatctcaggtcgattccgcctgggccatcgcaacctccgaacgtctggttcctgtcttaatagacaaaacggctaccgagcctggaactggaccatactattgagagaaagaaaaaagaagtcagcctgggcctcgcgcatatcgcatgataattcccaggaaagagaatcttaccgcttggtccgctctttgtacagcacacggtgaccgcagtccttgcagcggatctggtcgccgcgcttgagaggaacacgggcagagcactcgccgcacaggtaggtaactgaggggctgtcgatggccatggcactgccaaaacctccggcttgggtgtcgaagttgttctgggtgcccatcgcggggacctggtaagtttcgcgagacatcgtttgagattgagagtggcgtagtagtaaagtgattattttgcgcgcgagttgatcgtgtccagtggaaagataagagttgtgaggtggaaacgagctgcttctaagctgagatactcgggattctttttctttctagagcgcgggattttaggtgcttagtcatgcattccgtagattagtcatcgcgtccagatctccaccatttgggagtataaaagtcctctgattcttttagaaagtaggtttggaattctatgctctcataacttcattaattaatagcattgatcgtatttgaaggtatttataccttactcctatacatttatcgtgttataagccgagagcaattcagcccgccatgtatcatcgaccctaacttcaaaattatggtatatcccccagaaacatgcaagaaaaatcagatccccgcgctatgcaaaagaagtaaagaagaggctgctaagagaaccaccacaaagttgaatcatgcagcagcaaaatggagcagagaagagttaccaaccaccaccgatcttccctgcaagctccacaacccgactcgtatcattagcaggtgtttgatccttgccaacatcactttctaccttgcgatatgtagtatagacgagcttggagatggggatattcatgtattctgaccaggaccgcaagccttcatggattttagcctccttgtcagccaacgagaacagctgagactgagtctccagctcagtctcagactcagattccatggaataataagcctcgtcgacgcgagcaagccacgcgcgctgctcatgtggtgatggtttcatagatacgtctagtgcctctccttgggaaataccaaggatttctctggcgtcctcgactcggatctggccaccgccattcgtgcacccaccaggacaagccatgacctccacgtaagcgtagtctgatccagagctgcttgtggacacggcgttacgagatataggctggcgccgacctgcggcgggtctagcgacaggtctggcggcaggctttgcgccgggaagcctcgacatacgggcgggcttgagtttccggacaaggttttggatatttcggaaaccgtaatagcgagctgctttcaaaattgtttggccctcttgagacatgagcacgtactcgacgacatcgacattgcgtccgcggttgatcacaagttcgctgcctaaattgcgagcttggaaagtcatgagaacctgatgtaggtagcctccagaggtacctgcagcaagagttggttccgcccgagagcgcttgagggaaaggagagaaccgagggttttttcagggaagggcggtgtgaaagacaaaggcagaggttgcaaaggcaggtttgacagtgagaaccctcgagacgaagctagggatagaagctcacgtgcagtgataacacagtctacgtcgcgaaccggctgtgtctcagagcccgtggaatctccctgtcgccacgacacatctgtgagttcttctcgactggcttctagtttcttgtcaaagcagggcatgactgctaaatgccaaatccgcgaaggatggaccccgagggacttgctcaaaacggttttgaggaatgtccccgatagagcctgcggggacttgagtcgagaaaggtgtggaaggataaatgggtgagtcttttcagcgtagcaaatccacccaggacatgctgaggataaaataggtcgtttggggagagagtcatccgactggcccgcggttgttgagtcctctgagttgagggagtccgaaacctcgtctgcagtgagcactaacacagcctctcgcatggcattggtgtcgacaacccatgtaaatccattgccgtatttacccccaccccgcaagccctgcgggccactaagtaattggttgatcatattccccgcttctttctccgaaatcccataagttgtggctatactagccctgacttgcgggctgacactggccacgaagatcttgccctctccagagtcctcggtattattgactatcaccccatgatgctcatgcttcaagggaatctccggatgcgcgtcaagtgtattgaggacctctgcgtgagactggagtgatatcaacactgcttcggcagatgtaacacagccagagcaagcgagacagtctgtcaaagaaatctgtgcggggggtagatcctcggactggactttgtcttccgttgttacttcataggcgtcctataattagagaattagtaaaagaaactcaaataccacgcagttccaatgagataaatgagtggacatacttcttgattctttgtatcctttggtggaagggtttcaaccggtttgatacacgcgaccccgggcgaaatgaaatcattcagatcgtctgctgacaggatcgcgctcattgtggcggagtacgctttcggcggccgtgaatgcacagaaagaaatgactaaatttagccaatttgattgcaaggagtaatgagaatcaataaagacatcgaaaccttggaggatcaaaatagttcttcaagagggcgaatagttaagccaacggcgttgcatgctttgtcatggtggcgagatcggagatgatctcaccgccttatgcgggctgcacttgccttgattggtcagattggaactatgcacgtgacctgcttgatgtttctttcaacttcgacattctgtgagagttgcgactctttgtgttctcttatcttttcagttaatactatgtatataggtaactctactagcttacatgtagtcaatgaataagtaaatacagtccataaagagctactggaatgctcttcttcatcaaattatcaacttccctactgtttttctatcattaggccatgcgagcgcctgtccagtccgatacctccagatcgacacagtccaaacgatcaatagataccctgtacgccaatcaatcacccacaagcaaaagcaactgcagcagtagcggcctcactagagcgatgagtgacgttggtgttgatgttgacactggcgaccttaacacgccgcccgtcactatagtcggcttttcagatttcgtggcaagtcagcctggtgtacttgaagagcaagataaggtcgacacgtctcccctggctgggaaacgccctcctagtactcatggaaacaagggaagtggagtgaataaggtttcgcgcgatgaaatgtggcaggtcattacaacaacaacgaaagccgcgataggaattctgcacaaaacagaattggagggaactaagtttgcttatctggcgaacatatttaacgctccagtcctaggccttaaggcccctaacctcagggagtatccaaacctaaccactgtggttagggtcgaggcgggagacacatatgaccaagccctcaagatacacaatgctggcagcaccatcgatcttatgccagtatgtgttcttagctttgccaatggtgaaatgcccggtgggggctggctcaacggtgctcgagcgcaggaggaacagctctgctaccgaagcacactcgtttacactctccaccctcggttctacccaatgctagatcatgagtgcgtctattcacccaatgtgatcattttcagagatagcgcggataccggatatagcttcatgtcggcggatgacaagctacacatgaacccaactgtcagtgttgtcagcatggcagcgcgaagcagacctcaattgaccgccgaccaatccacgtacaaggacgtggcacagcgatatcttatgaaagcgaagatgcaattgattctacgcacggcagcacacaacaatcaccgccgcttggttctcggcgcccttggttgtggcgcgtttcgtcatccccctcaggaggtagccgactgctggaaagaagttctcatggatggagaattcagtggatggtttgagttgattcactttgcaatcagagactcaaacgctgagaataatcttgcaattttcacagagacattggatggtttgaacatgggataggtttaattccatttatctgtgttagcttcttccacttgggagaagtttggggtcttcttagacaggcgcaaattaaacaagaatcttctagtcaagttgtgtgttaaagaagtggcattgacagtacggaataaagcgagagtaaacccaaatttaaaatactgcctggcaatattaatcaatgggagggccatgctccgtgtcacgatatacttatagatcgccagtacttgacttcatacacctcacttagatgtacgtgtagatcgtctcctgccagcaacggcgggctttaccttctcctcttcaaagtactcactctttacagtggggttcttttgttttggggctcctcgcttctttgtctgtgttgtttcttccgcttcggactcgctttctttctttagagccacacgcttccgtttcgaattagccggtgtggattttgcaacttcttcatcaatatctttgccgacagaaccagtcttcttctggacagctggaacgacagcacttgttcgtcctccaacggtaaggaacgtgattttatccccattcggtagggcggcgggctggttcttctttccctttccccagcggtgtttgaaaagccagtgctcgggaaacttctctgaatctgccagtacaccaatagatgtagagcagacataatgaatggcagagtgcagcgccttgatctgatcatcattcaaagtgttgctgtattgctctgggtgtatcttggcatgatagagaatctcgtcgcttaatataattagcttatttcatggcttttgtttacctggaagacctaccccatccaatttccgattccactgatattcgcctggtcgagcagaaaagccttgatcggcactttcttcttccccagcttctctgtcaaccatgcttcattcacggtgtctttatcggcaaccggatcaggcccattttccttgagcggcgtatgattgcggatctcatcagcgggacaatccaccagtctaatgcgactaagcctgcgggcatccacaaatgctgcctctgttttcggctcgtcgcttgtctccagcaagaacttccaatatttaggaggccattcctgatctgccggcttgtcggttcgatagtagtatgtgtcggcatccttgatcttcaaccaaccagacatcccaaagtgcatcacagcgtgtggtggtgaagacattgtgagccagaaatattttccttgttggcctgctcccacaatccttttcccttgcattgcagtttgaaattcggaggcactagtgccaactttgccaaatacaatatcatcatgttgggcttggactttagacagtgtttttccaaccagatgctcacgaatgaaatgcacaatgcggtagatctctgctagttcaggcattttggtatgatgcttccagtttcagtagtaaaagcatgtaataaatgaattcaaaggcaaatacaagtgcttttttcccgaaagacgatctggcataagcagacgcgatgctcctaaacgcgggtcgcgttgtcacgtgcatatagttgaacaggctagtcctaaaacggactggtgcttaaggcttgattacggcatgacgacggtggttgacggagactttgctcgggctattcatgaatgttaccaacaactagtatcagttcgttattctgctcattgcagtctatactaggcctcagtgagatatattcagcatcacaagtatcaaagatacgcttataacgccattggacgacctaccttcatcaaatacgcctactcacatccttactacaaactggagtggttttgggccaagccgaatcgagaagctggcgagcacactggtaggagcatgtcgcaaccctcatctacagctcctccggcgctgacgcctcggttctgttttgacgagagactactcagaggttcgttcgaaatatgacatcttgataccggcttatattgactttactatttcctctttctgttcagattttctccgactctcaagatctacgatcgatgactcgattacacagaacttgaacgcgttgattacaccagcccagagaggatttgacccagcatcaacagcggtgcgacaacccgagtctggctctcggatcaactccgcagcgtgtcagaactttaaagataatgtgttattcccgtcatggcaaacgagatcagacgttctcacttattgcgctggtgtggctacgagtccggatcccgacgatcccgacttgattcttcggcagacagaatccgcccgagaccgggaacgagaagttgatgagcgtctggacccctactccgctcgtttctttccacgtgaaccacggactgagtcattggccaatttaattcgcaatgagcgcacggtcgaagagatcgttcgggcccgaacgtgggggatggtgtcagaaaaatgcaatggatcttcttctacttgggaagaagctctcaattcctggcgccattcccatcagaaatgaatcctccagcaggagcgtgccgcagtatactaggatcactatataactcaactcttctttagactcgggaaggcctcatcccaaattgtacagatttgcacagatccgacattatcatatccgtttatttgcatcttcactttgcttgcagtagaatacattactttaagaaactgaggaatcctttctagctcaaactttttgtgctcttaagacagtgaaaatttgcactacagtacataacaaaccacgtgcgcatcacgagatgtgcattttgccccctattgacttcaggtatatatggtcaatggttatacgtattcaacctggtttacaaccaaaattttacttgtgaagaagtcggctgctcgctatcttatcggaccattagctctgccaagatcggactcggagaggtcgtcccccgcacacatcgattcctcactcgcacaagtcaggtccctcgacgtcagcatcgcccacaatgccggaaacattgagcaccaaggaccattccttgtttcgtcaagtggttcaccactttgagatgaaacagtataagaaaggttggcctccgaaacgaccctgaactacctaggcttgtctaaccacgttttactttacaggtatcaaaatagcagaccaggtccttcgcaaaaatccgaaacatggcgacacgcaagccatgaaggcgttgaatatgagccagatagggcaattggaggacgcctttgcgcttgccaagaaggctctccagaatgatatgaagtcgcatatcacctggcacgtgtatgggttgctattacgccaggagaagaactacgaggaggccatcaaagcataccgatttgccctgcgtctggagcctgaatcgcaaccaattcagcgtgatctggcactgctccagatgcagatgcgggactaccaaggatacattcggagccgcagtgcgatgctgcaaactcgtccgggcttccgccagaactggacggcgctcgctatcgcccatcacttggccggggatttggcagaggccgagaaagttctgactacctacgaggacacattgaagggtgccataccacatgtcgctgatatggagaactcggaggccaccttgtacaagaacacgatcattgctgagactggaaacctcgaaagagctctagagcaccttgaggctgttggataccgatgcactgatgtgctcgcagtcatggagatgaaggccgattaccttttgcgactggaccgcaaggcggaggcggagggcgcatatacagctctcctagagcgcaacccggacaactcgatttactacaatggcttgatcaaggcaaaggatatccccgaaagcgaccacaaggcattgaaagctctatacgatgagtgggtgaagaagaatccccgctgtgatgctgctcgtcgcattcctctcgatttcctagaaggagacgatttcaagcaggctgctgacgtctatctgcagcgcatgctgaagaagggtgttccttcattattcgtgaacatcaagcagctttacgttaacccggccaagcgtgatgtagtacaggaattggtggagggatatctctccgaaaagacggcaaatggatccgcggagtcgaacggggacaacaacgagttcctgtcatgcacatactacttcctggctcaacactacaactatcacctcagccgcaacctccccaaggccatggaaaacgttgagaaggcaattgaactgtcgccgaagtctgtagaatatcagatgaccaaggcgcggatctggaagcactacgggaatccagagaaggcagcagaagaaatggagaaggctcgactgctagacgagaaagatcgtcatatcaacaccaaggcggccaaatacgtgctccgaaacaacgataacgagaaggctctggacctcatgagcaaattcactcgcaacgagaccgtcggtggcacattgggtgatctccatgagatgcaatgcacctggttcttgaccgaggacgccgaggcgttcctccgacagaagaagcttggtcttgccctgaagcgcttccactcggtttacggcatctttgatacgtggcaggaagatcagttcgacttccacggcttctctctccgcaaaggaatgattagggcctacgtggacatggtgcgctgggaagaccgcctgcgtgagcatcccttttatacaagaatggctctcggtgccgtccaggcccacctacttcttcatgaccagccggacctcgtgcatggaccgatgcctagtggaattaatgggatcgattctactgatgagaaccagaggaagaaggctctcaagaaggccaagaaggagcagcagcgcttggaaaagatcgaatccgacaagcgtgcagcaaggaaggcagctgccgctaatgccaagggtgctgacggggagactaaaaaggaggataccgatcctctgggcaacgccttagtccagactcaggatcccatgaaggatgccatgaagttcttgacgccgttgcttgattcaagccctcagaacatcgaagcccagtgcctcgggtttgaggtttactccagaaggagtgagttgatatggtagattctaataccggacgggaccctcatgctaatacgattatagacaagcatctcctcgccgtcaagtgcctcgtggccgcccattccatcgatccctccaaccccactctccaccttcaattgcttcgcttccgcaagtctcttgagagccttgccgagcctcttcccgaacaggttgccgaggttgtcaatgccgaatttgacaagctgcttccaaagacccacaaactcgacgagtggaacgagtcttacctctcggctaacaagggcagtgtggcacacgtgcaggccggtttgtctgcccgtcaactcctgaaccctgaatccaagccgcagtgcgaacaagatctgcttgctaccctcgattcccccgatatcactatcgacgaggctgtcactgccttggacattttgaacaagtggggcagtgataagactgcttacgccgagaaggcgggcaagaagtggcccgagtcttcggtctttaagctgaactgatttgatacgaatggagaaccgtgtggactcccacccccatccccgcttcgatcatgagttgcctagctgcctagcaatataaggagttaggacaacaaaataaggttacagacatagagaaagacacgggatgagcaaatatactctggtattggccgatgctaagtgcagtgagtatacaggtgctgggagaatccaatgtaccagtacaatcaagccagggctaatcgtagattaatctactccaaaattcaaaatcactgtttctatcaatgtacatttctaaaatcggaccttcaaacgccttattatacaagccgaggagggagtcacaatatgctaaacaaaaagaccaacacatgccgtgctgaatgccagggaagaatccatcccgtaaccgttatagtatataacataatttcaaattgtgaagatcagacagaagacgtctgaatatctcttcactgttcgtcttctccgtcgatgttacccaaaatgggcttacgtctcaggacctcgtcactctcgccgtagccgtaatcgatccacatgcgcttccagaaaggcacgtgagccggtcgctcttcgccaagaatgtattcctgttgctcggcgatgcgttgagaacgcgcctcatcttccggagaaagggtggcgcgctgcatgcgcgaggcaatgcgcggatcaagcacgatatcgtcgagccactcgcgttccttcacgttctcgtcttcatcgcgcttgtgcacagacttgtgccactcaatttcagcagcctccattacggtctgctgctcatagttgcgaggggggaggtcggtgaacgagctgtcaagagaaagggtgggttcgctggcggaagtggactcggaatctgcgataaaggtgtcttcgcggtatggccgtgcgctattcgcgaggacgagtgcggcaacatcgcgcccgacgtcctcggcaaggtaacgttgtgtgaggaagcggtacattcggatcggggtgttcaggaagccaaggagatgggggaattcaactggggtggagctgtcgaaggactgggggatggtgttggggagggtggcggaggagtattcgctggggtagatgtatgcaggagtaggaccagctggcttggcaggcttctcttcttctttcttttcttccttctcgggttcctcgatcttaggcgctgggatctcgtcctttttctcttcggagaactcgggggaatcgatgctcgcaatctcagggaccgcgagactagcgggtttctctgcactgacgtcctgcgatagatctacgctcaactcctccgcaggcggaagcggcgcatccaagggcccgagccaaccctcatgcaagccccggatatactccttccaggtgtgccggccgatgatcaagtcgcccttggggcccggttcgtcagtgaccccaatgtgtgcccgggtagcagcaacgactgcatccacgccgacctcttcgggcgctgagctgggctctccggcctttcggcgcagtttgcgaatgttttccgccgtgttgaatctcacgtcgccctcacgtcgcccttcgaccactgtgtaatccagcgccgcggccactaggatgggcttgacatattccttgaagtgatcccgagccacacgaagaccatctcccggtggcgcagcaagatataccgtcatcttccggcgcatttggtcgactggcagagtttctttcgaaatgtgggccacgagctccgaccacttttgttgcacgcgacgcttctcccgacgatcgtatataagagcaccagcgaatgatccagtgatagtaaagaagatcatccagttgcgagagggcagtttgaaccgcatattaggaaggcctattaatcacagcagtattagcatttttaccactcgaatctggggaacagagacatacccatcattttgaatactgggttaggcggcttcggggccaccgggggcttgccagtgccctcgggcgcggcagagctcgaggaatctgccattgggctgtatgatggagaaatggcttatacgtataaataaagtacacccggggcatgctcgttcggggaaaattgttgcctcgggattaccttatcccgactacacgtgacttggtatcagactcggatcgggtcgcgacatgtgaaatgtaaataaacggcacgctgtcacgtaacctaccttcaatgccgccgacataaaagacccgtctttgctctttatcaccggcgaacgtctttattcacataacctcgcagcctttttagaaaggtacacctgtacctggaaggtctctggtttctggagcggcacttcctagagtaaatcaagctcctcgattgccgcttaaaagcccaattgtaccagtcttataacctatttaatgcgcctatacaatgagaataacatatataatgtaaagctacgtgttattcgatgttctctgtttctgtttttttatcagagaaatcgagtgtgaatgtcaacggggcatagtagaaactgctctgaaaagaaatgtcgttagcatgctttataactcgagaggcctgataccagttgagaaaactccgaaaatctttctataacgaaaaggaaatcggtgagtattggtggtggtatatatactacttcggccctagctttcttattcagtgtagtaaaaaagtaggcaaaaaaatgtgagaattcttttagtatagtactatctctactatctccccttaactgataggtatatagaaacaattcccgtttcccgctagatactattattgtatacaccctgtataggaaccctcctactgtaaagccttatcccgcccttaatgaggccgtggtccatttgctaattataggtaagttttctgacaagttcttactataagacgtttaaaagtagggggaatcccctgccatagaatatattgtgcttaaggtatggcgaccttttagtactgaagcggtcactgaggaggctctcgtgagcctaaacgaataaaaggctaactctgtaaatcgtatgctaactttctaacccattcgcgaactctagttccctcttctgctgaatcattttggcgtagtattacccacgtagatacttaaggtcctggtgctttgttggttaataataggttattagccgctaaagtatatgttttagtatgatcccattcctactccttgctcgtcttctatggcccgatcaaacaaatcttcgaagtcgttgctacaccgaaagactgcaagattccccgctggatataactgaagcggttgcggcttaagcgaactagcgactgccctggaacggctcgctggtatgatcttttggtctaattgttaattataagaaacgagatttttatactccctgtttaagtttggcagtaatcagttattaaaaccacccttttcagtttggtatcgctgccctaggcggggtacctttctccaaaatagtcatgtagtcatataccacgtcggttacattcgggatttaaggcactatgtattttctacccccttttcagtggtaatcatggctaaggcttcctgtccacagcccccttcttccatacggagcattcccccatactgtggctgtgcttaatatactgacctaaaatgcgagcctgagctatatcagcctcagaaccagatatataaaccctttgttttcccttgtctaattcttccttagacctcggacgtaaggaagtctatttcccactcttcaatgtgcttcacacaatcctcggttacccttaatccaccacgactttcctcggttggttcttgtattattttcttgaaagaaatacgcgctaatctgtcttgcctcggtctagattgtcaagaatgtcaacatcctccagcctcagaaaagccaagttgatgaggcgctggaaaaaagccgggattgttggtgtcacctcgcatcactagcctgcgcctatcgggatcatggcttgactccggagtatacaaacccgcgcctcatcctctataggataccaaaattctaaggccggcccagaaaagtccatgttcgcccttatggtgtctctccaattcctgtgctttgtatgggcctcttctacttggaaattggtaggaaacccgaactgctatatgatcgagaaagaaattacaaattctgccctactgaagattggtatcggtgttgctacttcttacggtctttgtgggagaatcttcagttcttggattggtataacagaagagagtcacgccggtcccaattatctagggattctcacagttacatggtgttatatactctctgcgctgctcgttgaaattcaaggggagggcgctagtacgtattatacaatctctgagaccgatggtgaaaccctctccgatcccctacagatatatacccttgacgttggggaagcgaatgataatgtggctcgatggtggtatgtgatactcgtttaatatgaagggtggagagcgatagtgaaataaattcccgaaggtgaattcctagtactatgggcggtgtcccgcacgtgtcaaacacgcctcagaatcaaacagaagagatactcgccggctttagcttgctctcctttaactttagaacaaacctttgatgcccttactgagtttgcgtgtttccgtgaactgggtagccaatcacctattactcttatgacagctataacgtttctaatgcattaacactatggctcaactgtctaactaccatttctaatagtcactggtggtaaactgcgcacggttcctatttcgtagatatggttaagtttaattagagacctgccctactatatgaccctaagctgtagtccggaagtagtgatgtcgattctttacagatcattctgggaacttgaagtaccttataatctctttaacccttggttgtatctagttcttaacgagatactaagtggaacttctggcacgtaacaatgattacgaaatacttgctttaatggatgcaatatattgaccaaatattagcgctcactggatcggggtagcgataagcgagttagccctaaaaatcatttaaaaggtaagaagataagaagaggtaggcctcctcttgacgcacttgcctttccctggactggttgtccttaaagctttatagatactgtaggcttaggtccatatacttgtgtgaatgcggaatacatttcaaggccagacgtgtggcgttttctccacctccctctaaacgaggacgatgacttatgctattgcaatagatcctatataccctgggcaccctgtgggatctctaaaacaaaagattgcgctcttcgtgtgacttcgcacttgaaatgcaatcgatatgagtaccattaccactactagaaccgggacacagaagaaggagcgattctttaggaccatggattttcaacgacagatggtttgatgcattctgaggagctcactgtcgctccatgcagtttgtagaccttctgtgtggcattcctttccctttctttctcttctctgacagacagctcaccggcaaacgcgcagcttgccgcgtcgacgctttcctttgtatgtctgcagagatgcttctcctgtgttctggtaggtagaatctggctgccttggtagtacgaagctatatagacaggcttcggtacagtagctagtttcgcatcttccatcaacacatcttccatcaacatctcctggttgatcacttcttccctcgtagtcagaacctctcatcaatcgctgatcaagtcacaaggtacgtgaaaacaaacattctgtcggatgagacgttcaaacatgtttcaagtgttggagtagagtttgcacaggcggaagacgcagcgcagtgcctgatgagaatcctcggcgacaggagtatcaacgggcattctttactcgtctcaggaagaaaatgggcttccagtggatacattgatctggatctggaagactacccaagcaatgcgttgattcgcgagatccaaggggaccaaataaaatcagctcctgttgagcttggattatttttgtgagcagcaacaaaactggctcaaagtgatgccaccgtgggaccaagctcttggtctctttattcggtgttttgcatttgcaaatcccgatatcgtttgttctcatggcagtggcatgtcataaccaggctgcaatgtgggatacggcatatccggaagccccatacactcattgagtatgtcatctgtgcttatgttccaaaggaagtccggccataagtctgtatcatctacctgtgcaacttgtgtggcgccataattttcacccatcaggggaacatcttgcgagattgcgctattggccaaagtagagggcccgaagccgccatcggataatcctgtaggtatttgggctgtatcttcagaaggcaccaggtgatacttttgctcgaaccattcaaggatatgccacagccatgcctcgtagaagtacttagagtgctgtttcccatctacagccactctgtccttgctgagccattggattagttgtaacacagtccgcaaaatgtgtggcatgttcaaatccgagcaaagggcacgaacatgtggactgcgtggggcgtattttgcccccatgatggccagtttgcagcctagaaccaagttaaagcctgattgcagccattgggtatgactgatcagccgatgagtattcggagcaaatgtgaaaaagtaatcaaagaatttctttgcttcggtcatgccgcggttgagaaattcgacctggaagggtgataagtctaacggttggtggccacttttgaggtgtggtggtagccctgagtctgcatgggagcgaggcgcgggcgaagccgaatggttggctgtttcatgtttatcaaataagcaagcctggcatagaaacaattgaagagtgtgtagttgaaattgaaggagggctaaaccgtgggccgtgagttagcaatagtttcagcgtaatcaatcaaattcacaagcggtgtcacttacaattgtccgaaggcgttgccggcaaggtcgttctgtattcgttgatttcgatttggaatgcatgcatatcaacctctcgtactggattcgcagtagtggccacagcatcatcgatccgttcaaagatttgttgtaattttactaattgtactaagcagcgatcactggcaatctcagcattggatagtaatccaagtgcatgcttttcaacataggacagccgagtcatcatgcgatccttttgcaatattgtcgagtgactgcagacacccatacccagtcagtaatatgagggggatatgggcattgttactgaccatgaggatagcatgtaacatccaatcaaagctcgtcttctctcgttcaccgaatgtctactactgttttcatctgaagagaccttgctcatagccatccgtgaatagtatgaatgggtttccgacaaccggtcaagccgcaaatcaccgacgatactccaagcaagatgaatgtagctgcaaaatctttcatgctgggactgatgctgcaacctgggatattgaggctttgagtcagtagtgtcatcttcaataaaaccacgttggattagactcaccatgccaaagccacaagaagtcccagcaataaatccatagatggattataggcgaagatcatctgatcagcaactgctttttgaaatgtctcttccaatatctgctgagaggctgcattcttgtatgatgagaccttgaggatagccagcaagagaagcggtttctctgctcgcagctgcgcaagcgtcacttccggtgcgatatagataaaagggaaaaatggcatcaaggtttctcgaaaagattcaagaatcgtgacggcatcatcaaatctcacgatcccgcgatcaataacatctcggggtttatccgggatggaatgaggttctgggtcagacaggactaaagaaacatcagcctggtgttgagtgtgctgcttattgacgactcgagctaagagctgatccactttggcttcgagagcctcgactcgtctgattttttaagcttccgtcagcttggattcacagtcacgaatcaaatgggatttgggagccttacgtccccttcttagcggggttgtaacgaggtcgagcgggccgaaaatagcactctttgccaaggcggcgacatctgagctcttatattagcatatggttatagttgagaataaacatgatgttcgagttccactacttgccgatcacagatagaggaatccgaagttcggatacatcggattttgccacgagcacaattttgacatgttttgatgtgtcctgacatagattccatgttccaaattggtatagtcacggtgaaaggagcatcaggacgaggcgagttgaagaggataaggataaggacacggacaaggacacggacacggacaaggatacggtcgaagggcaaagtcttggcatcggtggcccgccaggcaacggctttactagggatccactacatcgtatcaatcttgatggcaagttgattattggtttgactatggattcgaaggatttgggagtgagattatctcaagttgaagctttaaaatacccacacagcctcgtaatgatcattaactatggataggcagcgtcaaacacctttgggtctgcacataaatagtgccgaatctagcatggatttgctgatatcaatttaaccacagcactcattctcttcaaagtgatttgatctactatatttcccaagcctctttactattgcgtgatcatgtccaattcggataattgcactttgcagacatgtcctttagatgatgcttatatccagtatcagcctaacatggctggaaacatcttctacctcgctcttttcgcaatcatactcattggacagatcggtacgggtatcgtatttcgatcttggactttcatggtgccaatggtcgcgggccttatattggaggtcataggatatctgggccgaattctcttacatgataaccctttcaacttcgatgatttcttgatgtgggttactgagcctaccacataattgaatgtatgctgaccgaggcgtgatgcattaggtatctgatatgtctcaccattgccccggcattcttcacggctggaatctatctatgcctcggtcgtattgttacagtttacggcgaagagttctcacgcttaaaaccaagaacctatacctacttgttcgtgacttgcgatctgatttctctgatcttgcaagcggccggtggagccatcacttcaattgccgaagaacagtcacttcgcgatactggtgtcaacatcatgatcgctggactagtctttcaagttgtatcactagtagtgttctctattctagccattgagtatggagttcgggttttaagagggagacgcctgcattcccctactcaggaacgaccgacaagctggatgaggagatcgttcttgcttggtaagtaaaccacctcgatcttttctatgggcattccactgactcgagtttcattatcaggtttaacaactgccgttctaactatattgatccgatcttcattccgagtggccgagcttcagggtggattccacagtaaattggccaacgacgaaatagccttgatgatcctcgaaggcgctatggtttcaattgcgtgcatttgcttgaccggtctacatcccgctttgcttgtgggtaagaagtggaggacgcctaaagcaattgcacgagacttggaaatggaggataaataagccacaaaaacaagagggactgacgctggttatggacctgttgggtcggcggtttttcagccgccaaggataatcatggtgcatacaacaatgctttttggatatcatttgaggttatggaatagctatgttaagtctttgtacggaagtcactgattcgattgaatgcaatatctattcccccatgttattcttagttataagacttttcccgaccaagtaagcactcacttttgccaataacgttcgacgacagcgataccttctaaggtctttagcttaaagtttagagggagccatctaagactgcgaaaatgttccagtctggctcgagtttcctcgcaaagaatgggatcggtctagtattggtgctcatcggtttgagccgaatttacagatgcaggtgctatagaggaggtcaattacaaagactagggtggaaaattcgtattataggaagcgacaaagtcgaggtcgtctcgaggcgtaggtaacgaggataggaggataggaggtgcaaggataccggagaggagggaaggcgaagcatcttataggcgctcaaatggaccgggcgaaaaggaaggggacttgaattcagctaaaagggaaccattctcggcgtcattttagtggccagtagaaacgagtgtaaaagccgtctaagtcgagcgtcaacatcaggaccggaggatgactaaaattactgggcgggtgcataatagtggtgttatagggcagcggtcaaggggcggctagacgtcccaaagttacgggtgaaaaggcagccgtttctggcctcaaaagcggtcattttcggcgtcaatcccacaggtcctcatattctagttgtaaatataggctcttcgccctgttctggccacccgagtccctgggctttgcctttacatgaatactgcaatcgtctaggcgaatcatagaagaagcaactgcctgacacacggcatgcaggccacaaaataccatcgtcttctggaagcaaggcatggaatgataagaaagtatacatcgtataacctggagtactagagatagaacatgattaccaaactgtctttatttcgactccccggtactggtatgattctctgccatctctaatctatctcagcttgctgcttagcaaccttggagaaccctgtgattgtgtgttgagttgaattgaaacttatcgcttacccaaccccctgaaaataaacaacgcaatcacaaaggagatgcaaatcatgccaaaattcattcattggaccgcggtccttgcatactttgtgattccagtctgaacagctgttgcaatagcccaaagctcgacccaggctatttgctgtcttcaatagcccagcaccaagcgcctgctcctctggggccagtgcctcagctactagtaggcttatctctggccggataatcccaacgcttgagcatgtgagtattcgtagtctggaagaatggcccctagttgtctggtgattattagctagacctagatagatagatgccacttgtggaatatatgagtacatagccagtgaaatgttttacgaggcacttgcacttggtacttgtataccatccacgagatgcggtatgactggtccgactgactcaggcgattcggcctcaagagccacaaaagtatcgatgtgaagtaattgtgaatagggaaaatggtggcctccttcttttgctatcacgtcaagtgaactagccaatcacaccatcggacaacgaatgccattgagcttctgggcagccactggggcactgcctcctatcctcaccattcaagatgacaattcaaccgactatgaacgccccgagccatgatatccaactgcgtggcctaagtgataatagtgtggcggtcgatgacagcaaagcgagtggcatggaaggcggggaaggcaatgatacaagcctacacgaagagaatcctacggattctgaaatcactaaagaatatcccactggcctgaagttctggctcattattctcaccatggccgccttgattatcctaggtgggcttgacaccaatattgttgctaccgctgtgcccaggtgcgaagttgaaaggcgaaggttccaatattccataagctaatcgcattttgatttctagtattaccgatgagttccacacaatggctgatgttggctggtactcatcgggatttagactcttacaagctcttctccgtcaagcgcatattcatgctcgccaatgctatactcttggtgggatctttgctctgctccacggccacaacatccaccatgtttgttgctgggagagccgtgactggagtgggctttgggggtatcctaggcgggttatacactattcttacacatatcctgccacttcggcgacgacctattttctgtggagtcttgggaggcgtcgaaaatctagccattattgccgctcccattattggcggatccctgacacaatcgcttggttggcggtggtgcttctggatcaacctacctattgggggtgttgcgcttctggtgacatttttcctattttcggatccaagtccgggcgacagaagtatggggtttagacagaaaatagtcaaactcgatttgctgagcaacctgctcttcattccagcgctgaccagccttttcattgcattttcttcagactactcagatacgcgaaacattgcctcggcgatggaggctcattccccatagtatcagaaccatcaaacgacgcttccacgactggagaatactccacaacccactcaccatttttgaacacttgtcttagaaatactgtgctatcataggttgatatgaaaccatacctcagttgaagatccaacatatatccgatgagttgcgcaaataatttggctttgcgctgggctgtcgggtactttttgaacttgtgctcattcacccagggggatttcaactcccacatagcctggatctggtcaatgtcgactgggtcggttgaaataagtgccacatcgggcgtgagggtatatccggaatagacactagcaatattggctgatttggaatctccaaatttcactgcgatgttttgagcattcaacactgatccaacaacctgacccacagattgctggaatcgcccttgaagcccgtgctcatcgccaatggcaacaaattccgcatcaacccgtctactctggaggctccatcctagcaagctcggggaccagtcttggttattctcaaattgcttcacatcttggaagaagtctggccagttgtgtaaggtcccgaggaatcttccctcatgcaatgcgcttgacgtggtgtgataagggccaatatccagcggtggcaggggctttcgtagaagggtacggcctgttatcattgccggcattttgaattgagctaatcaatcattcgttagtacggaccatacacctggaatgtagagtctagagtctatattatagacgataacatactggaaagtgtatagtgcaggaaaaaaagaaagaagagtggtgataatgtgtgggtgaaacacagtggagtgggcagaggatgttgtctgtaacaatgagggacttgttgttgttgatgtcgagagctgactgtggatatataagcttgtaagtcgttcgatggagacattcagaggagatttggaacgcgacagagaacacctttgaagtcgtttttggtttggaaaacacctatcaagggcccgatgacgaacggagattatcaaatgagtacagagtgcaactgtgagacgtgaagacagtacacgacgtagaagatgaacgagatgaaaaggtaaacaaaaggtacaaaagctaaataggcaggcaccgacttccagcgctcagcctcgacagcggccattgttgaatagcctctctgtcgagcccacaatggcagaattgccgccaaaagcagtggccaagctacacagatcatgaatggtgcattcaatgtgaaattcaaaagtattagactcaacagtaccccctattctagagcacagtaatgacattttcgaaatcagagttatggtccacaatccactagaaacagccaacaaaaaagctcatatgcatggcacaaaaatatcgatacttgtttaagcgcaccacctcggaacacaggctccgtcttcattgatcccagtatactctcaacaagcttcctatactatagctttgcatctctccttggcctcaccaatccaagcgccgacatttgacgcctatccattaaagcggccttttaccgaagagtactgttggatttcacacactctgtaacttaacttcttcaacaattcaatccatatctcacattgcaccatgcactttgacgtccaccaagtagacctctcctaacaagtacttcgggtctatatccaatgctatctagaaagcattgaagagtactaacagagagagagaagccacgtgactctcagtcactaacctgttcccattctcaaacatgagtttgttacaaatgcccaccttacgggaatagctcaagtagttcatgcagggctcagtgaggatttgatttaatcagagagtcggagttggactggtcaagcgattcttcataattagaactagcaaaatgtatccccattccttactttgtcatgagaccttcgtctaccatctccagcccttttcatcgtgataggtatcaatggaagtgatactaaggtaccattcatctgacttgctgtccgatacaaggtcaaactgcacaaagaggtagtcatcccattttgcataaccgtcttgaggccatcagggatggccattttggagaaagaaaaaagaattgtattgtttcctcaaagagaagaaaagagaagaaaagagaaaaaagagggaaataccagtaaggacatgattagaatagttgctcgggagatagttttcaacccaagtttataaggaaagagcatatcccactcactggcttggtacttactcgaaagtggcaaccgcggcagacctcgtagacgcataatcaggaatctcaaccctaaccctgacctctcccacttcaccttgaaacaagaacccaatatccctcgttgaatcaaccagctccacctccctccgcacaaaccggctcttatcaagaccattgtccgttttctcaagctcagagccaatatcaaggggaagttcatcctcactatcctcattccattcaaccacggcctcatcgccaacttgtttctctacaggatcccactcgtccgtctcccagaccagccgaaacccaaacgccggtagcccgaagagccgcgacacaagcgccttgacctggtacgtatcaaacgagccaggaatctccttgacttgactcttggattcgtcatttccagttggcagacggaaagccatcttgaccagtcgcgctgctacagaccgcggatggatgactctggcgcctgaagaattcgacaaaaccgctcttgtgatagtcggctcgacgtatagctcgcacagctcactgtaccgcgggtgtgtggcgagaatggcgggttcttcttcctcggtcgtggcggagagttctttgccgatgagggataggtagtacatctctgcattggagcggtcttggggagagatggtgctgtagttcagggtggtgagggagggtgggaaccgagatagggttagcataaaagcttcgtcgacggtcattggtttggaggcttctgtgacagatggtgggaggggtggttggtcgaagaggggattggcagtgattcggagggtggttagacctgggaagacagtagggagtttgttgaggatggtccaagaggtgatattattgcgggatagatcgagagagcggagagtcggcgggaattggaagtctaggtttgtatctgtggtgttttggttgacggtgctgataccgtttccacggagggagaggtgctccaattttggaagtgcagcgaggtgtcgaagagctgatattgaggtgatttcattgtgctcgagggttaatgttgtgatagtgctagggagtggacacgttatctcagagagctggttcgcagatgccgtgagagacgtcaagtcagggaatcgatatgcaatggcagtgatctatgtccgaagtcagctttactcaatagtatctgtggtggacagggcacatacttcatcccagctaagcagggtttgttctaaatgtagctcagtaatccccttgaagatcaggtcttcctccaacgcttgaaatcggtttccgctattctccaatcagatctactattaagaatttggccagatttgagacttacttcaacctcagccgtttcaggtgcttaagctgatcgcagatatcccaaacatcgcgccaccgactcaataagcttcgactaagatcaagttcggtgatcttaggacaggtttctccaatcttttgtgctgcctcattatgtgagacttgggcttgattgtaggatgcaaggactccaacaacccgtaggccatcaagcaagacaatgcgtaactcttggagctcagcgagctgtttccgaattttgtcgaagccaacttcttcaacaaccttgccgctaatctcaattgccttgccttgaattgctgatccactagccaaagcattgtgggaaaggccatgctcggtctccgaagcatacttctcccgcagcgcttctagaaagctcagaggctggtctgaaggcctggaggggcgaacaaaagaccccgccgtgggatgtttacttttgcctggaatcacgttagcaataatgcaatacaaaagtgagatattcatacatgagaagtacctgacgcctttatgctctcctgaatgcttgcctcgacttgcgtcgtcccattcaacacctaaccagtcaccggtggtcccttgaacagtacccacatagcgaatagtacttaagtgatcatcaaatgaacgacgttgacctacaagtgagacagtcatagctcagggcagacctaacagttcatttgttcatgttttggtgagcgctacttcgtactgtgatccatgcccaaatagccagcttatgtaatcaacagcatttcacatggccagaccaggctcaacttggattgatagttgaagatcaggcgcatttcatgtaatactagataatacactgcatgtatagtaggtcaagcctagatgcagctagcaaactctttttgtaagctttttaacaagaaaaagccgataaagagtcatattgtagcatgtagaagaaggcggtgtctctatcaagaaggcggtatataaaaagaatttccggtagaaaggtgggtcgctgtagttaccgcccgcgcaaaacacctagagatagtgagcttcacccactttcttttctgcaacctaccgcatcaagatggattaccaggtacgtacacgctgacttagcccgcgcggcttcatctctttcatcaagaaagagcttatcgctgacacatcccgcagaacagagctggttccaagttcggcggcggcggcgtcgcctcccaatctgccaccaacgccgaccgacgtgagcgacttcgcagaatcgccatggagactatggatatcgagaaagatccctacatcttcaagaacaacgtgggcaccttcgaatgccgtctctgcctgacagtccaccagaacgacggctcctacctcgcccacacccagggccgcaagcaccagaccaatctggagcgacgcgctgcccgcgaggaccgggaaggcaaaaaggatcaatccaccttgcctggtgtcgccggtgttcaggtcaagaagcagctgatcaagatcggccgacctggttacaagatcaccaagatccgcgacccattgactcgccagaacggaatgttgttccagctgcagttccaggagatcactccgggcgtcaagccccgtgtgcgcttcatgtcggcctttgagcagcaggtcgagactcccgacaagaactaccagtacctggtggttgccgccgaaccctaccagaacagtgcgttcaagatccaggcgaaggagatcgatcgccgcgacgagaactactggacctggttcgacgaggacagcaaggagttctggatccagatcctgttcaagactgagcgtgaggagatcttcagcggtgttcctggtctcgcgccctcccagacctgaaattgtttttttttttcgatatcctctttgcgcgtttttttatctttatctttatctttaaccatgcgcgtcaatcaatcaatcaatcgatgaaagttcaattaacctgttgcagtctaactagttgcgtatgactatgtaggcgcttctccaatcgaagcaagaattcgaagctaaacgccgagccggtatctcccccatagatgccgatttcttatagcgcatagaacctataaagccccatgctgtagtgggggattccagtataggatgactaagcggccatatgaatgactcctagcaacgcagacaccttcagccaccttctcttcttagtagtcaccccatggtgttctcctctctagcaccctaatactcccagtgacgactctactctcacacctgtttcgcaggaaagactctcggtgcccctgctgtcccattgcagtgtcccctcttctcgctttctctttactctctcctgccccagtcctgactggtagtattgttatcttggcccgttgattggcctattcgtcgactattgctgagtttctcgcttcacagctttatcaatcgtcactggctggtacccatcgtgttccaagcctaattctatagccgcgaggcctattggttcctcgtcgtcgtcctcctcgatatccacttgttggaactgctggaggagacctgtttggcgcatgattttgaccacgtagcgggtggtctgcgggtttgatatgatcttgttatcgtccatttccttgataacaactgcccatagctgctccctcagctttatacgcgggatgatatatcctgggcattgtttaaggatatgcttcggtgtttgtgatccctcatcacagctgcaccggtctgtctctgctgccttgatgttgaataagaaatgccgaagcccgattctaaccatgcgcgtgtcggccttccagcttagagttatgacaccaatcaatggaactatcaaattatgaaatatcctacgatgaacatagtcccctcctaatttctgtgttgatattcgcctaacatacttgatgtggtcttttttgtctctttagatatccatacctgctgctggagctcgatccctccattctctactacccctatgccctccaccccatatctaatgccgggacagtccctatgccctccaccccatatctaatgccgggacagtccctatcaccgtaccaaatatgattgagaagaggataagactatcagggatggccatgatgtgaaaaaaaagaaagatttgtgattgatgtttattcaacgtgaagaaaagaaaatatttatggtaaattcgatgttgacgatggccctcctacctcgccaacacgccttcatggtcctcgcgcggcgcgtcgctccagattcgtctggtgctttcgaccctgggtgtccaggtccaaaagcaactcatcaagactggctgacccggatacaaaatcaccaaaacccgcgacgaattagcccgtggaggcgttgacggaagagttcaagctagcttagatgaatggtaaatcttcgtccttttgtggctgttgcgcgtactgccagttcgttcggcatggcaataagcccacttgctttgagaacgcgtccaatacatgcagaacgatgatgatgctaattgtaatggtgtatgtgagaagaagagaagagaggaagatagaagagccaatacatagtctgcgtagtttccatgattggagggagtagttgctcagggggatggtcaagacatctgaagagacatgtaaagagatcgggactaggggtttctgtcgacttcacatatgtatatactatccttaccttatgcttattatatagttatatagcactgacgatgaactcacccttctccgcagggtcagtgactagtcattgtcaagtaaagctaagatgagcttaaatgtaactatactacatacttatctttagtctaaacattataccgctactatcttttaagctaagttatatgtgaagcaaagcggaaaacgcagtactacttgtcccctttccatgatagaggattaaaagtcggatcaacaccaaatcgtggttgtaggtatgcggtatgccacccacggtcagactagctcgggggatctagtcttaggacaggtagcttaattgaatatgtttgatgtttgctagtttacagaagtggccagctatataaagcaggccatcgtctgtgatctggaacgactgatggatggatatgatcgacccggttcgccgactcgcaggcttctgaaaccagtcatagcattgggcaacaaagtcattgtatacggctgaggcactaacgtccaatgtagtcttctctgttttagagactcaaaacgcattcgactgtgaaccggccaagtatatgaaaaaatagtgcattgcaagaagggcagacatagtcagaaaagacgagtgcattttatttttagggtaatatcctgactatcctaaatcagctgggtctatccgaagatgtgacaagtagtgtcgtcttgaaagggatgcaaggcgttagatacatatgtatcaacaagtgaaaccgaagatgggtcataattcgggaaaacaacatcgcgctgatatgctcaatgagaatgagtaacgaggtgaaaacaaagccgagtttttttctgaccgacaaaagagtaccattgagaaacaaaggatgcaagccctgcatgcttcccttgtccccgggaatcgtttcgatcagtctcggaacacaacaaacaataaacctaagtggtttcgaaggcattgaatgccttataggtgtagccgatgaatggcaaactcatctcggcttcctgtgagtccggcatggcacgggcctgggcgcggtggatcgcgctagtgtcctcctgaggaatctcatcaatcgggaagtacgacacatcaatgttcgagctgagacgcggctcgaagggagcacggatgctgcgcagttgatcccaaacaacacccctgaagaaggggtggcttttgatctgtgtcgcgcctccgtgctgaccaccttcgctgccaatacggtgatccgggtcacacaagaaactagacaattcagttagcggatgatcctgttgaatttggatgcatagataaaagcccaccttcggatcagcgcctcggagtcacggccaagaaccagttcatccgggaagtacaagcactctctccagttcacgattttccggtaagtgtcatttgtgtcttcagcacagaacggaggccagcccacgagacattcaaacatgatggcaccaacagaccaccaatcgcagagataagtgtagccttgaccgttgaaaatctcaggagcaatataatcaggagttccgacagtcgaataggccatggcacgacgtgactttcgccaggtattgatctgaccacggttggacactgtcaggttgatggcatcattgaagtatccagagttgcggttccgatccttggaggtagagttcttgaggaggttttggtagtaagcgttgtcatgagtcttcttgcctccggttgacagaccgaagtcagtaagcttgacgtgtccaccgcgatcaagcaagatgttgtcaggtttgatatcactgccaaagaaacattcattagtatggattgtcttgtatgttggcgtgtgcacttgattcttcatcggagagagagagagaaaaatgcatattgccaatgtccaactcgcgaccaaaaggcacttaccgatggaggaaaccaagcttgtgtacggcttcaattgccatcacgacctcggccatgtagaaccgtgtaatgtcctcagagaagatctcgtacttgatcaacatggtcatcaaatcaccaccaggcaaaaactccatcagtaggtaaaggtacgcagcatcctggaacgatgcgtgaagcttcacaagccaagggttgtcctttgaatcagccagaatatcacgctcggcacggacgtgggctaattgatccttcttgaacatttcggtcttgatcaacgacttgagggcgtaaatcttgccatcagtcttgcgctgcaccagcttgacctcaccgaaagcaccctttccgataatcttgatggtctggaagtttgccggtgtctcctttgtgcgcaggaaccgaaggaaatcggactctcgcttggaaatcacgtcggcatcctgtcgcttcttttcgatggggatattggggtcacggagggttttatcgagttccgccgatctataggggcgaacatcatagataagtcacaactcggaaacaatatttcaaggattccattggggacatggatacttaccgcatgttacggtcacgggcccgttcaatattctcgtggaagaacacagtcaccaactcctttgctgccttgcctcgcttgtgggcgttctcggagtaccgatcggggaagcgctgcaactcttcgctctcggggggtgggcgagggctgcgaggcaccggggggatcaggtgtgatgcttgggcctgtgtttgagccggggagccaccagcggtgcggggccgctgggctggggaaccagcccgattattgaaaaaccctgcacggtttgagttaagatcctgattagagaattgctggatcagaccgttggtgccgtcagggtagcccgggcgcgcttggtaggcgggctggggagattgcaacgcttgctgttgcgcgtactgctgttgctgttgctgctgttgctgggcatactgcggctgtacctgttggggtgggtaattgttgggcaggaaataacccggggcgtaagcgggattggaggggtcgacgtattcctgggccccctgagtctgatagatgggctgggggaaggcggagggggtagtgggataggcgcggttgttggcattgtagttacggtcatagccgtaattcatattgttgcggttgttattgttgggatccatcttgactcgaactcccaagggacttttcaagggtgatgggggagaagaaagttgagaggaagggagttgaggacgagggcggggagtttaaagaagcggtggctcaggtgctcaggaggcaatctagccccagcgtaactggttgacttgttgtttacatgttacatctttctaccacacgattacctgaaacagctgtgttcgaaatgtctttgatacttttcttttcatctaatgatttaccagaagcaagcgaaatagtctgagggagggaattaccagtgtgccaataagctgatatcgatgttttgaaagaggacaatatgttttacatgcatactttgcacgtagcacctatgttgtagtaaacaacggctctccgggagaatccctggaatatcccgaggtcactggcatccagggcgttgtgtatattgtacagcttttttcgcaacttcttggttttctctttccaatttgggaactcagctcttgccgcttttggaggagcccctggatgtattacataagtacaccacgtgatctcggcctaaaataacttctgctccgcatacgaaccaaacctcagaaagaaacggatcctgaccattcttttcactgcataacgagaacttacctattaactacgggaaatagaactacggaaaagagtgtcttctattatttcaacaaagcatatagccgacagaacctatatctcaaggacaccatcgaatcggacgtccttataccgtgctatatactaaacccattcggtggtgtccttgagattctatgcttcgttgactttatagaagttacctgcaagcatacttgataggtaagctctcgttgtggggtcaagggaatggtcaggatccgtttctgatacctcggatcgcagccaagcctatcccccatctcgagatcttggctacgtaggccgttataggttcaggggatcatcagaatcttgcgcgtagtcgatcctagtatgatatctctggacggctggccggtacccacgtccattagctgttatggacgtagcgtggtcatttcatctcgatatcacgtgaagttttgttctacatcccaggaggtaaaggaactaactacagaaaagcaaaattccgagtgacagacattaatcggtcaatatgtacacaagacagatggaatcatatcattataatcccacatgttcggggcggaagaaaaggccaaaacgccgtagtgctttgcgcgctcactgcccagtcccctaaacccccaatagaaacaaaaagaaagaaatggtgaacaggcagagaattgagatcgtatcatcggaacagaagaaaacataacgcctgaccatgatgcttttgttttgtcgaccgcaaaagaacaagatgaaaaccccgtgaggacgcaggatcgagaggatggtgtaatggtccttggttaggaactcattatgcaaggagtaatgaaagagtatgaggggcaatggagacgctcgaaagcggtgttagtcacaatggagtggattacccgcgagcaacccaccatgaacggactgccatgcagcaaatccgcttgtagacttgtgttgtgcccttgccctcggcttcttcttcgaggaacttctgtgcgacgaagagcctggttcctgcctctttctcggtggtgtagcccaccttgggcaggctgttggggaagtcagcccagcgctgtcctaggtgacgtgcgacagagatggagtagatgatgtcccgattttcgtatgtgtctagcaattgtcgacaccgactgagggtgtcgtcgatctgtttggccgagcttgcttcgttgtcataaagtgtgaggaattccccgacttggtcccagaaatccaattggcggctctggaactgatccggagagttcggggggttggcggcatccatgaccagctcccgcgacaatgggtttgagtccaggtggttccaagtaagcaatgcttcaaccacgtttaaccgtgcgcaagacacacagagattccagtcccgcccctgttgtccagtctctccgtccggtaccttgcgacacaacgacatgcttttccagataatcgaagcctcgaaactctctagacgagcaagggtttcaccgtcttgaagatcccattcgttgaacgcgatgatcaaagccgaataatccgccataagctgggcatcggccatgagtaatgagagagcattttcggaataccagcgaacctcaagaagcttgtcgatcgcaggtgcatatgtggccaggaaaactgcttggatctcttcgaggcggcctggtggaagagttgcgacagggtgagggggaggaggagcaattcccctcaaagagaataggtcattgacatagagatttttggctgtggagtggattgttagctacccgtgcataatgctgcaatatgcagatgaagaaacaaattatatgaactcacctttatatgaaggctctgagccctgttgccgtggtacgccagtgttctgcatttctgtatgattggattgatggttcgttgccaaagaagaatcgatggaagctctgtgctcgtgttggtcggtagaggcagtgggcgattcggattgaagggaaggagcaaatggttgagacgaagcgggcatgtacccgggaggagcagaaggatatgaagggtatgaaggtgctgatgaattagaatgtccttgaggattgacaatcagcgaaggaggagggttaggagctggttgaatagctgaaggtgtagatgcttgagtccgaaacacaggatcgtagcccaaacattcacgtttgcttttcacacaatttctgcagaccggatgtgcttcgtcacactaaaatcgagttagacgtgaaaatggccaaatatccaaaaagccgataaaaaaaaaagaagttggagattgagagggaggtggatttaaggcaaaataaatggcggggtctggcgggcacaagcgagcgactccgccccgcgaaaactacatttgcgctcaccttgattcttcgtttgcgacaggttaaacaaccggtttttgtgcgtcgcttgacttctttcttgtgtctattgcctgataacatcttgttcgggtcccccgggagttgatatcgcatttgcgcattccccatattggagggatagcccgtcatgtattgtcccatggaagccatcggaggcatattgtttgggagcggcgatccaatcggtgcctgtggcacctgtccttgggatccggaattgtgatacatgtcgttttgataatgttgcggctgtgtctgaaactggtgggtatgcgcctgtggtgattgatggcttcctggttgttgggattgagcgggactatgcgaatattggtatgaaccgttggttgaatgaaagtgagatgtcccattcacagccccattgtcgtgcccacccgtagagtccgccatgcccgcgttcgaatcatgatggtccaaatgactactgtcgccgaaatcatggccatccattgttgggatatcatcagttccaatcgctggtaaggaatggtcgagggaaatcgcaggaagtgacatgtcgggaggtgcagatgaacctattgaaggcaaggcatcaaaggactgcaattccgaatcatcgaagccatttgatgtgtccatgggtggaagtgatggatcaatcgctggaagtgatgattccacagacggtaaagtcacatctggaccttgtgcttgctgggtagcttctggtggctgatacgtgctggcatcctgtggtgggcctgcggcggacgaatttggtgctgctggcacttctggtgttgctgatacttctggtatttgtggtacttccggtggcagcacctctggcactgctgattcaactggtggttctggtggctctgacggtgttggttgggctgattgagctggttcagctggttgagttggcgccaccggttcttgacttgtttccacaatgggttgattcgtttccgctggtaaaggctcattctgggataagggttgttctgtctcaacagctggcgcattcggttcggtcgcaggattggtggattcgccaggcggggcgctcgagtccgtcggctccgccatactggaattcacagcctcccaatgaaagtctcgatcggaggggagaattggtagatattttgcaagtaggcttcggagacaaggtcttgagtaaaggagtagtcgagtaggcaaggtcaaaggtcgtctggtttgtggctgagcgaagaaatcacaccaggtcgaacggatggggagttagaaatcatttattccctatgatctgtggggtccagcatttgttagtcaaaatattcggccagcattatcgtcagtgtcccgtatcggagagtgatagagtcctcgatgtcgatcatcaacatcgccaggaaagaagcactatgctagcgcaggccctccatttccacgtctttaaatccaatcggcggatgaaccatgtgcaggatatgtactgagcgcaaggactgtgcatttgtacgaatgtccatatgatatagagacctcatggcgtgtccagatatcctgctagtcaatcgaggttttgtaggtcgcattcgcggtggccgaccagcctcaaatgtaaccatctgtcaacaactcccacggggtctcggaaaagcatcgcgaggtagaatctagcactcaatgacctcatttgacagcaggaatactggacatcgtatcgcacggggtgaggctccggcgcgagacggtgcgcattggtcgagggattggcagggcctgcggggatcgcgacttgctcgaatttcaaagacttaccaggtagatagatttttaagataagatcgacagaagcacaaatcgcggggagactatgcagatgcgagggtcgcgggtcaagaaaagcgcgaaagagagaggctaaaggagctttcctttccggcgttgaaactctccgctttgattgtgaaggaaaaaaaattatagtggcaaacaccgctttctaccccaacattgcatattccgaagtttgatatctgtgttttcacattatttacgttatttacacttgttttatttgttttgtgaatgctttgctgatactgttgtcttatttggacttcgattaacatagggtcgaattaatagtgtcgcatacagcccttctagtctagatccatggaccatccatgaaagctatagattgtcctgggaagaggcgctggcataagtcagcctctacatggtcaaaggtccgcttcaaacgtgcacgtgtgccaatgaataggacgcgtttgaagataggcattcaacacagaagccttaagcttgcaaatgatcctatgggtgaatgggttcgaagtgtacattctggggagcaatattctgccacgagtcttttgctgaagaatgtggtacatctctgatattgcttggcgcagtggaagtcgtgcattgtgtgcctgttgcttgaagccacatagttgcagacttggagactcgtggggtcatgggccaatggatagaagtcggatgtagaaagacccgaggggttaggattctcaagggtatgggcttgcatttaaatttgagccacgacaaataagttttgcggatatcacatcctctgaaggtggcactatttcctcattgccttcggcttgcgcttcttgaagacgacaccaggcgtagcatcttcactctgcggcttctcttcaaaaactggctctactgaagattgagcgggctcttcagtcttgatctcacttgactcattcgtctcttgcgcctctggcttgaaagaatcatcttctgtctttgcagtgagggtaggttgttcagtagctgtctcttgctcatcaagctcgactttcggaatgaaggttttcgtcctcttaatatcttttgtggatgcaatcaagtcatccaagccctcgtcctcttgtgcaccagggtattgcctcatcctcgagccccaacctttgttgataataggttcaggcgcgtgctcatcctcctcctcatcgccttcaagtttgcgcttgcgtattccaactgactttgtggggccttctaatccttgctggacctcgatccttgtctcagatgtcgtctgccaatcccctgctaaggccatatcagcgcggaattcctcggggacggcgacacccattgccacgagctgtgccatctgtttctttcgttcttctagggaagcaggtcgggctgtggatttaggggctggcggtgggtttcctttcgcgctgtctttgtcggtggaggacccgccactgacagcctgtcgcaatcgttcgacttcggttttcgcgcgttgtgaatctctttgtttttgttcattgtcattgtgtatttgtctaaggaagcgcttgagattgccttgatgttttgggctggcttcgtgttgggtcttttcgaagggcgtgtcacggatgaagaccttgcactgtttgcaccagtagcgcggctgtgaaatagtcagcagggttctagacaggtaaatttcacacttactgctgatttccagaattcagacatgccggagtactgagttggaataagaggaggtgaattatcgagactttgatcgcattgatattgcccggcagaaagctacgtagttaccccactccgttggccaattaaccggaacttcccttcaccacctaggaacatagctctataccgagtactccgtatatatttgtactatttggactacctccacttctatgggactaagcagatcttagcaaaggatgctcaggtcagtgacatgtgcatattactaagttgtccctaagaactcgggaaattgtcatattaagtcttataagagctatcaatcttccgaaccaagaatttccagttcggtaactaattacaaaatcggcagtcctgctcgagattatagtatatctgcaaagcagaaaggttctgtatagtagagagaaagaaggacgaccaaacaggcaaagaggacgacgacgtattatcgggtttataagtaaacagcaaagagagagagagagagagattgatagaagggttcatttctgaaaacacattttcatgacaatttgggatcatgctagatcaaagcataggtttatgggtgctgtggcaaggtgcaggcgtgattcaatccagttccgctgtcgagacgcccaaagcccaaggtccatcatcatagatcgtagaacgacgaacatccctcgcagtcatcgtcgcggtatatgggttggcacgatgcatcgattggctatgaaaatcagtaaagaataatataagacgggtgagacttaccgattatcccaccagaccatatcacccccagacaaccactccatgctgaagacatactgctctagttagccctggattttaacagaatacggctgacttaaactcacttttgattgtgtacagtgtttaatcaactcccaaatcagcctttggctctcttcaatatcctttccaacgatccgtttggcatgcgccgccagatacaatgttttccgcccgtctggtgctgtttgtacgagacggtggtaggccggtggtttggctgccagttcgtggggaaggggatttccaaacacagttggtgccgcgagctttcgggaatgccagagacttaatgaagttagcttcagacacggggagatttcgaaacagctggcttactcgtgctcgacaacgaggttctcaatctcgtcctttttcgcttgagatagatcaccgtacgcacgacgtgtgtctgcaaaatgggtccatgatccgcctgcgactgggtttccatgagaaagcagtatggaatacttggaccgatgttggtgatatgtggagtcctagattgggttagtacccatgtggctttttggggacgatgatgattacagtgtgccatagcgcattgcccagactgtggtagtacctgcgactatccatcttcaccagagagccatcctgctcgatgctattctcatcagaatgtgatatatatttaagtttgcatgtggaatactcacttggcaacgtcgaagagtaacggttcacctaatcggtcattttcacgtccgtaaaagaacggattgatttctagtttgtcacccaattgttgcgagaaagcaatgtgccgaatattgtctagctccgtctttcgaaagatcagtactgcatacttgtcttgcaaagcgatcaactagcatcttgtcagtggtttcttccaacctctcaaatattaactcacttgcgcgacgacgtcatctgatacaggtttgctccagtcaacgccgtatacttcggcaccaaagaatgaatcttccgagtggagtattgggtggatagacaatgtgccttcttggatcgtttcttgagcacctgtccgagaaggacatgtgttatcgtacaccaagatgtgcatatcgtccaccaagctatgcatatcgtcagacattgaattgcgaagtgagttgtgtgatctcttgatttgagaggcactcctcgtttttgatatctccagataaacccgcacgcggcttcaagcccgcgcggcccgaccccgaagatgccgatgcaagagctacggccactcaaataggatagcatttcctacctgtgagaaaagctaataattttacttcttctcatatcaccataatgacctccatcctaataaaagccggtccataccggttccgtgcgaggttcgaatcgtcagctcccaaaacagtggccctcttccgcactctcctcccataccgccagaaactcatccatgttcgttggagcggggagggtatgtggatcccattaggagaaactgatttcggactaccgtttgagaaccatacggctcacccttctgcgggtcaaattctgttgtatcctggtggtatctccgaaaccgagattctgttctgttatggaggtgttgcctttgcaagtaagatgggaccgctggcggcaaatcatttcttgactatcgttgagggaattgaaaacctaaaggcactgggtgagctggtgctttgggagggagcgcaagatattttgttcgagttggatgatgctgataggtaagtctgttctattgtatagactacgacctcctctcaatactaattatgtatccaaattctcgtataggccttgttctgcaaagctatgatattctactatcagtcatgaaagcatcccgtccatattcaactctgggaaatcaagcgactccccgaaaagattccctgcccagtcaacaccagaatcattcatcaaatctagcagagactggattgccatatcatcaatctccgtttcctcgatatgctgctcgttcttctcagagattaacaccaaagcaactgtatagtgaacaatggcttggaagtcgtgcgcaaaatggaatctcgtggccagagacacgctgtcgaagatgtctatcgcaaggaggaggagtcgagcgagaaccgaagaagaagaggagggaaggcgtgtacataatttccctttctcttgactagagtcttcgctgcaaatttgtaggttttctgtttctcatgttgtcagttattgatggactcagatcataaaatatctatatgaatacctcaccatcgatgatgccccgaatatagcaaagacataagaatatgatagcgaacgtatgcgaaatccaggtcgagtccaccgcatagtataatcgactcacggatgcacgatccacattgtatgtcccaccgggaaaggtagatagttcctgcgaatccagcgagaagacaatatctggcttgaagctcgattgtgctaatattatctgcgctgctgcggtcaagctcactgaaagcgcttgttgaacatgtggtttacttaaatccgtcgatcgatgtacccgtggggaagaaagtagtggtgcaagggatgcacaattgagggagagtcggtaccactacatcgcaggttagattaagttcctgaataaatgtagttaggtaactgcatacccgggccgaagtgaatggcaaatgattgtaatgggattctgatttctctgatgattgttaattactgtgaggataggatgccaaatgaacgcacctaaacgagaaaaccaagatctgcgaaccgtcagtaagaccaaaaataactccaggaagattcacttgcctctcccaatcatctaaatcactattcaaccgttgcaagcaactcggttgcaatcgacggccagatatatccccagaactagacatagcaaggtgaactattccgacaagttccacaagtccccttacccgaaggtccgcaggggactgcatcagctcatgagagacaaacctccacgccacctgaaccgatggagtaggatcaattgatgcgggtagaccggatgtaagcatgaggttgaagttgcatgtgagcaagttgtaccacactcgtagctttttcacatcctctatggatggtaccttgtcagggggtttgaatagtgatgtggctgattgttcgaggcccagtagggcagagtatcgctctgctaatcccaagacaacccaagcactgatttcgttgtaccggcttttggtctggggttcgtcataggtacttgggcgcaaggaatcctcatcttcaccctctttgctgcatggcatccactgggcatagagaagaagcacacagatagaatctaaattgacatctgatggggtaggccggagtaggagcctggagaccgctttgtcgagtaattttgtcagatcataaaatcggggatgaccgacaatagaatcgtcactgcacacgagtattattagcctagcttttgggtctagaaattttcgctcacgttcgatcacctatatcccagaaccgggtaccaactgagcatattgtcaaaataagtgttgggcttgtttgaagatattcatgccatgtatcccgaataccttcatctaatacaggcgctgagtgatggcaatgatcaaagaatctgctgaatatcagtaggtggcatatttcccagatggagttgtagaatacatttcaactgctcgccggacctcttcggctgtaaggagcccctggtaaataggatcgtacatgttcttgtatctctgcgctctcagagttgactcatcaactctctcttccgcaagcactcttaacgatcgcagtgttgcgataggaggacctagatggattccgtcgatttctgactcgggagaatcatatatgttgctttgacttttcgggagagcttcttgatgctcaggctgaatgtctctgggtctttcttttgtattgtggtcaaatggactcttctgattttcaagctcagatattcgggtttcatgttggttgagtctgcttctggtcttagtgtctgctcttgactgggtcgcaattttcagtctcacctattttgaagttcaataaccagttgtactagacccgatggactttgagtcaggtccaatgttggtgctctatctgtctcaaatgaacaagtgatgcttagtctttgacatcgcttgcatggtaattgtagattggatacgtcggatggtaaacatcgctgttttcgtgtgtgacactaaagcgcctatattaagtactgcgtttctatgttgaacacgcaatactcacttgtagacaagcccgggcaatccgacgcactttagcagggcgctcattatctgtttgattgtctgaccaattggcattgaaggacattgctgtttggtgtttgaacaagaagaagacacatcttagagaatcagatcagaaaaagggccaatctggggatatttactctgataacatctcggacgctgatttgctgccgataccctcagtgttgaggctttcatgaaagtcttatttatgggcctcgcggcttatttgacactttaaccttaacagaagtgcctgtattcgagttaattgtgtattccgctgggattcgcagagtacgtactcagcatatataatctcagctcctgccaactcatcctctgtgaatgcattggcaagagattgggtttttccatctttgaccccgatacaacatttgctttaattcgttagcgaccgtgagtctgtcaaatcaccaaaagccccgtggctgatgtcgctggcagtcacaactgtcgcattaatcacaaccaaatcaaatttaggccatactctcaatagtgtcagttaaaatttgggtgtcgcattggcatagtaaggcacaacatgcggcacgcacggctttctagccgactccatcggcttgtgccgcttatctggccacaacgttgtttgagatataggattctatcgctatcatttgattacgaacaatatcccgataactatcgcgttgctaaatttccttatcgtcccacaagacacgttgtgctaggtttggtaggccttacggagtatagttcggagaaactcgatacagggcccactacaacttggggagagagacagagacaatacattcaaattgaaagaagcagattgacaatgtatatagcaataaaataaggttgtcctgttaaacacacagagtcgacgcgagagaattatgatttagattctgtcggaaatcttctgccacagattctgggcagtttcctaggccaacgattaattatatgaaaggtttgggttaagatgggactaaccttctcgataacctcgctcgaagagccggtgacaaagtccatctctgcataatcgaccatctttgacttggtccagaacttgtatccaaagaagaggacggcaaagaacggaattggaaagtaagtagtaacaaaagaggaagcgtcaaagctcggcactttgaaggagatcagtaagtggaagaggtgcttcatatcttgcgaactcactgaaggaaccaaacccgccgaagatgatgaccataacgcaaattgaaattccatctaaatcgtcacatatattagtatctccgcacgaaatagagaatttggaagctgacagtatgaaagatatggttgaagaggtgccatatatgggagtgtctttcgatcgatgccctgcgccttgagacctttgttccaacggatgctggtccacaagatccctgtccaggagatcataccacacatcgcagtcatgttagagactttattgatgttagcttcatagcctagcacggatttcctcaagatgtccactcacaatagccaaacactgtgcccgcttctccatgggcggcggccataaatgagaggaaagagaaagcaccacagaaaagaaagcagacccaggggaacccatctgctcgagttttgagaaagatctttggggcatgtccacgggttgctagtccgtatagggttcttgatgagacaaaaagatcagctgtaccggcagaccatgcgctggtgagaagggctgcattaataatggaggggaggaccgagatcccggagttctatatatgttagcttttcagccctgggtaagggtttgcacggtgaattacctggatagcgataacaaagggactcttggctgcagtagaagtaagattgagagaagggtcggagggagacacgagaagtccgatctgggattgtaagtagactgcaagtaatcgttgggttttgaaacttaccaagaaagcactgcagatatagactggattgaagagaagggaagttagtgaattgacgtctgggaaacaaaatagctgagctcacagagtacaagcctaatccaaacactcttgatggctcgcggcacattctttcgtggctgtaatatgatgtaagtgagaggaactcgcgatcgggttgacaaactctcacgtttgaagtctcagcagctgcaattgccgtaatctcagatccaatgaatgcgaatgcagcattgatcaaaactataaaccgatgagttattcggtacgagctgatagttcgaaactggtctcaccgctgaaaaatccgaggaagcgtcctttcgaaccggctttattgaatgttagataccagtaagtgggtattgaattgatcgacttaccaattccttcatactgtacgaatccaccagtctcgttccaatatttgaatccgattgcctcgtggttaggtccgccaccggcactaatgataataccagtaataataaggccaatgatagtcacaacctatatcaaatgtcagttctctccatttttgaggctgcgctctttttatcttaccttgattgaacaaaaccagaattccatctcaccaaagactcgtgttcccgcatagtttatggcaaactagatgatcatcagtatcatttgtagtccaattctttgcacaaaagcataccacgacgatcagcatcagcccaacccacatggcattattacagattccagtagagcatgtagaatctgtctgtccggccggagtccaaaatgtgaccagaagagccgcagcggaaatttcagccggtaagacaactggagaaatcagttagatgcatcctgctttcccagaataaacaagaatagtcgtaccaatataactaaagcatttgtcaggccaggttctcatggttcagaatacaacttcacttacttataccagaacaggatacccatagcaaatccaagctcgggcgaggtgaaccggccagccaaagcgaattgaccgccaggaatgggaaattgcgatgccatctcaccgagagcaacctgcggatggtcgtcagtctttttgggagatttgaaagcgtcggcagttgccttaccattactgagtacagcaacgaagccataatacagtatccaataagaagaccggctggaccaccatgctggagatcgctcgctgtgcctagaaagaggccagtaccctagggaatcatcagcatgaaagtgaattgagctgacagtaggacggatgactgacgataacacctccgatggcaatcatttgtctatatcgaatcgtgagtccctatatatcaagtcccgcgtgtggcacttacagatgccgtggctatactaagttttagttcatccctgttgccatcaaaaaggtgtggctcgacgtaccctgagctgtcgttggagaccatgattgctacctatgtcttgggtagttcccatgctgactgggacttcgttggcatcataagccatttctttagttttctgaaatgtaggttaatataaaaaccatggatcttactcccaaaggaggtatatctcacgtcgtgctgcatattgttccacctagctggttgtcgatgaatgaattactttcgttggaaaaggattggatgatcctatatacatatgtgattatcaacgccatctacaaaaacgccacatgaaggttaaatcaaacttatcttcgagataaggctcttacacggttcatcaccgtggcgtgcgggtcgaaccgagatttcccgcgcctgtcttatcagcgggtagagaccgatgctcccgacgctcaccctcctcaaaggtacgagggatcgtcaaagattgaatgtttgaaccaatctgaaaatctggaatttgactttgtggcgactattcaagtgattgctatctcaaaatggcatattctacacggcctctacggccgggagtatacgtgccactgcccacgttctttgatgaacaccaagaaattgactatgacagctatcggagacatctgctaggtaagatagggctcttattgaaaattaccaatgacatgaacttatctgacaccgatcacagctatggtcactcgcggcatgggtaagttgtttgagcgtgtattatgaaaccacatattaatgggactccgcgttcagtaccagtatgtgctggatcgttaggggaggctgttcacctggtgagtttggttctttcctatcatgcctttagatagtactgatggtcttaggatttcgatgagcgtgtatcccttatccgcttcatcagggaaactctggatggggcaggattgcaatctacccccatagtcgctggtgtaggaggactcagtaccagagaaactatcagtctctccaaagctgctgccgatgccggggcgtaagtgaatactgaattccggcgattatcttccttctaacaatgacagagatgcgggtatggttattttacctgcctattatgccgcgagtctgaacacagacatggaccaagtcattcaatactatgtggatatttgcgaagcatcgccagtatgggttgtccataacgcactaactgcatcattgctaatgaagtgatagattcctctgttgctatacaacttcccatccaacgctggcggccaggatatgtcttcagaagttatcagcgcgatcatgaagaaaacatctaacttatgtggagtgaagttgacgtgagtcttagccttcttggcaactctcattttgacagcgctgataagaacagatgcggtggaagcatggggaagctgatccgtcttcaagccctgatctccgaagataccacaataaatgagactcgcaaattcccatttcttttactggacggccttattgctgatctaaccccctggatgcaatgtgctggtcatggcactgtgagcggtattcctaactttgtgccagtggcttctatgaggctctggtcactactgaacttgccatccccaacagagacagaacgcaatgaagcgagaaatattcaagcgattcttgcgcgggctgatgctgctgcggttccaggtggtattcgggctatgagtgagtatatccataaagaatttcgagggtactaggctgattacatgtagaatatgcattgaacaagatgcatgggtatgggattgctccgcgaagaccattgcttccgttgggggaagctgaagggggcgagtttatgaatgctttgggtgaggcaatgcgacttgagtctgaattaagagaggcaacgtcaactccatagcatggtagtctgttatcgcgactatgttggaccaagtgtcctttcttacttcacctttcctacggtcgttgatactctttgtatatgtagccaatcaatatctatcggagtattatggagtatactaaacgttgtaattcttattcatatcatactaaaagtacgaaagaagcaggacgaaataaacaaccaggtaatacaagcaaagttcttttagtcccgggaattagcaacgtctactcactttctagctagctacactattgataataggaccaccatctatccatacatactaattttcatcagttatcaagtttcggttaattagagctttaaatccaagggtcattcttagatacaatgcactatgctatggacgatcaaaataactttgccccaaactcttcaaaagcctgtcttcaaaggtccgcctgttccggaactgggctctttagttttccaacttcaagagccatacggatgttctcaattgtccattcttctatggcaagaattgtcttttggcaagtcagtctcacaccactacttatggggaaatacaaaactcacctcactagtccaagtgcccatatggggaaccagaatcacattctggttactgagcaacccaggatgaatccgaggctcttcctcaaagacgtcgaggccagccgagaacactttaccactatctagggcatcaaccagagcagcctcgtccatgacagcgccgcgggcagtgttgaccactaccacgccgtccttcatcttagcgaactcagctttgccgataatatggcgcgtgtttttcttcaagcgattagtatcataccacatctgcttcccttttggaacaagaaatcacttacattcaatggcaggttcaagctgatcacgtcactggtggacaggagttcatcaaaagaaacatatttcgcacccgctgacatctcatcactgagtctgcggcggttatgatagatgaccttcatcccaaaggcctctgcctttttcttcaaattacgtccaataccacccattcccagaatcccaaggacctttccctggggatcatggccgagaggaggcgccgggtggccacgccatttaccctcgcgcaaggcgttcatgccggtgttgaagttgcgcaatgcaccaagaatcaggaacatgttcacgtcggcagtggcatcgtccactgcagttgggacattggaaaccagaatcggggggttgcgcgcactgcaggcatgaacgtccacttggtcatatccggctcctatagatattgcatgtcaacatatacatatttgagcactcatatcataagctcaacgtaccacaatgcgcgatatatcggagtgagcttggtagcacattcactagctcctcgtctacaagccctgtttgactcaaagaccccattgttcggtatatcgcaacaacaccatccagcttgccgtctttgcactcttggatgaactcggctcgggtggtcgccgctgactcaactagctgtgctacctctcccaatgcattccaggctgcctgtgcactgtgtttgaagaatgtcaatttcatgaaatggatatcaatggtgcgaaaggatggggtgaacgtactagtcgatacttccaagacgtaggaccttgggcttggggccagtagaacccattccgatggtattaagggcagttgattctgtgttgatccagacaattagcaatttgagcagacgaggaatgtatagcaatgctagaacattaactctgagtcaatttttcaaagattttccctccagttttacttcgggtcgaaataccccgacgccttttcttgacatatttgaacttaccgataagcaagcagtccgatcaagatgataagtgacttagttgttgcaaaagaggtttgaagacacaaatgaagtcaaaggaacaagagacagagatattagacaataagagtcataactatatatattttactaagcatcggccgagaagcaaagcaagtgccctcaactgcggaatacctaaccgacgtcagccatcggctcgattgccgatgtcgttatctgttgacacactaaaatgctggccatgagtggtgcttttattctagtccactgtgatattgtgtggaatagaaaacatttcgagaacattggagacttcgtgttttcaactttgaaatggaactcgcgacggttcgagtaaatgtattcagccagatgtgtactatacagtgcgtcaaggggctatttccaggctcactagccttcaattagaatacgagtccagtcaaacttcttccagcgctttctgaatccgtcaaccctgcgatctccacggttccagcgtccttgtcgtttgataacgtccggtgcaacatccagcattccaccgatgatctctcgggcaaagagatctccacgaggccagcggttgtcgtcctccacaatatgacccaggccaccatctagttcaaaccaaacgtggaagtagggcatctccttcacaagggttcggcggaaggcagaccggcctaacccttgctttgatttagcaagggtatcgataagtttgcggtgctgcgaccattccgactcggcactgagaattgcctctttgaaaaacgcaggagcggtttctcctagactgtagggtaaaggcacgacttccatggatgcatgtcgcttgcgctgtggctgggctgcattctcgtagaagatcacatctcgaccttggtcgtggtacatacgcgtgagactcttcataaagttgcggatctcttcccactcgtcgtcatcgcattccatcaaattagtgcgatgttggattggtacgatagtagcacccccttcactgatttcgggttcggtaggaagtgtgaggaagaccctggtcgcaagggaaaccactggggcaagaggaggcgtgcccttgtcttcgttgtgacaaagcgggcagttgtccaatatccggttcatcttgtggaagtcattgatcgttgtgttcttgaggtcaatctcagatcgatgaacccttttggccaacttggacgcattgtcatccatatactccaagtcgttctatacattggttagcaggggaaacaggagtcatcacacataagtctaggactgacctcaaacttggcatcacggccaatttgatctgctaagcggcggccttctccgccgagttggccacgggtcttgcgctcttcgcgcaccatatcttcaatggtcatatcttcatttgcttccacctggcctctttcccggcctctcttagtatcgacagctttgacctcattcctagagcctgctagcatcgggttatgcataacatcaaggaccacaacatcggactccttgcggtttgacatagctgccgcggctgcattgtactgttcctcgagatcggcggcatttggtgcttttctgagctttgccttcatcatctgggctttgagacgattcagtgccgtcatatcgaggtgacgggtagtgttcggaggaggcacagtgtccattttcttgccttggccttcggccttcagttcctgctctggatcacgaacatgttcgagtggacctcttcgaatatcattttggagtttcctttcctggaacagctcgccactaggtttatctttgcccacataggacttgccatacgttttgcgccgatcaatctcagtttcctcctcccgagcgtcgtcaaaggagcgaaggtctccaaaacgctcagtagcaatatcttcaataggcctgccactttcctccgcctctctgtatacacctttgagtttggtcattctccattgtgaccccgaatccccaaaagtatagtccacctcgtgctgagcaggttcatcttctatatcttcgagtgtttttccatctttgagatcacgaagatggtcgttgagctccttgtcatgaatcttgagttcgtagtccgccgaaagcattattggtttcggctcctcctgtcgcgtcgaatccggtcgatgaacatattcaacgtcgagacccgagggcgcttccatccaggcgtcccgtttgagattactgggctcttcctgtactattaccggaggagcggtggattcgccctcatctttggaattccggtgatggcgtttatggccatgttcgtctccttggtcgtcggaacgacgtgaacgcttgtgtcggcggccatcgtcgtcgcgatgcctggactcgcgaactcgctcgctgtctcgatcgcgagatctggaggaatgccgccggtgatggtggtcggaatgatgacggtgttgtctcgagcgctctttgctgcgatcgcgatcgcggtttcggtctcgatgatgtcgcccttcacttttctcgtgtcgcggctctttcccgtctgccaatgatttctcaaaatcttctagagtcatggtgttcctgatatgtggaaaagggatgagaaaggcaaaatatggaatgacgtttataaaatgccgggcggtccaattgtagatctttccccgcgacaaaaaagatttcgaacagaagagaagagcttatctttcatcacttggcttcttgtcttccacccttgaacaatacataatcgactacagagctctctgtaattttattcgcttgatcgagtctatctttctataaacttccttcaccatggcatctccggtggccgtggtctgcgtgggcatggcaggtaaggatgctgatcgcccctcacctatctacaacgatctaatcgtcagtgttatggattgaataggctcaggcaagacgaccttcatgcaaagaatcaactcctatctgcatgaaaagaagaccgtgccgtatgtgatcaatctcgaccccgcggtgcattcggtacccttcgagagcaacatcgatatccgtgactccattaattacaaagaagtgatgaagcagtacaacctgggtcctaacggaggaatcttgacttcattaaatctgttcgccaccaaagtcgatcaaattatctcgctcctagagaaacgcaccgccccgaaccctgaaaacccttccgcaacaccaatcaagcacatcttggtcgacacacccggccaaatcgaagtctttgtctggagtgcatcgggcagtatccttctcgagactatggcgacatcattcccaacggtcatcgcatatgttatcgatacgcctcgcgcaagctctaccagcaccttcatgagcaacatgctgtacgcatgtagtatcttgtacaagaccaagctccccatgatcttggtcttcaacaagactgacgtcaaggatgctgagtttgccaaggaatggatgaccgactttgatgcattccagcaggctctgcggcaggaggaagacgcgggggcctttggagctgagggcggtgccggtggctttggttctggcagtggatacatgggctcccttctgaacagcatgagtctcatgttggaagaattctatcgacacctcagcgtcgttggcgtcagctcaatgaccggcgatggtgtcgaggagttcttcgaggctgtggagacaaagcgacaggagtttgaacgtgactacaagcccgaattggagcgcaagaagaaagagcgcgaagagcaatcatcatcccagcgggagcttgaacttggaaaattaatgaaagacatgaatgtgtctgggtcaagccggcagccgccgaggaaatccaccgaggagcctgagactgtcagtgaagccgaagatgaagaagatgatatcatcaagcgtggattggcagatggagaagacagtgactatgaggactacgtggggcctaacgctggcaatgatgagggtcttactcaacgttaccaggaggctctggcaggctcacaaagtactccatcagagcaggataacagcttcacaagatatctgcgcgcaagcaatatgcaacagtgaagcaatctgtcacaaaggggtcttacttgttctgaataggctcggcttacggcgtttgtggtcttagaggcgcatttcattatatcaaagtaatcaaatatcatcttagtctattttgtcttcgccttggtatagtaacacataccgggtgaacctttgcaaacaagtcaaacggcaatgttgctgtatgacgtcacttgctcataatgcagcagccttaggaaatgatcgcccagaagcttcatcttctccccatttctgatacgagctacttcaatctcgcgagaatttcaattccattcgaacacatactagcgaatttccatcatggatgtgagccaatcctattactgtctccaagcgtcggaagatagacctcgaaaccggagccaaaagctaacttgacaggtctttcgcgcctacacatacacgacagccgcatggctgtcacttcagagtctacctctgatagccggaccgagcatgatagtgaccctgctcttggatgagactcggcctgcttcccgtatgtggcctacctcctgaatgtgccgcgcgcacccgtttacgagccatgctaacctttcgcccttgaaaagccattgaactatacttcgcccggtgtttcggcttcagtcttctcacaattgccgttttgaccatgatgctgaccggctccatccccctgacggccgggatcagggagtctgtgtcaacagaggacgacgatcccaaagcaccatacgctgtgccaactctgatggtgacctctgttttccacaccacatgtgcattttacgcgtacacctggtatgtttccggtggatcgggtatctttgctgttggtgttgctggatactctactattgcggccattgggttgtggtgcatgctctttggcagcagcaatggaaggatcagtcgccgtaacggtgcagacaagaggacagcggggtttcctttcaagaactcggaagcagcgaagaaacataacaagggtctgtaagctgccgaggctggaatcaacactgcatccatagattcaatgtgaatatcgtatcccagtgttttagtagaataaatctgctattcatcattaattccaaaaagataattcatagaagccgttttttttttgtacctgagatcctcatgatgatccgagcttcccttaaccccacaatgccgcttcaaccgtccttcttctcctcaaaagcagcacgcctctccacaactttatattgtttacaagatggactctgagctacgactgtcgtcgccccgcttaggaccttcaatgtcaatgaatgatcagtctaacctacagttaggccaatttgacccggaatcgcaacccttcgggccattccgtcccccgaccgaaactgaatcacagctccagaacgcgacgcatgcgtttattcgtcctccacgatcaggcgagtcggcgaataacttcatcactacgtctcaatccacacagcagcacccaggtcaccctagcaatggagttgcctcgcacttacaaccgcaagggcaatcctgtggtttagatcaatcgcaggactacaataatggcgtcgctcatgcagcgaatatgagtggggcattgcatggcgctactgctggacaaatggcacctccagcatcgctgtctcaaaacgagctagcgatgggaaacaacgcgcatcaaactcagaataacagcttaacgctgcagtcccaaggccaaccgtttcaaccagacttcatcgagctggatactggctccacggattcagtggccttcaatgggcccggagaactgcaaggcttcaaagtggtcccgaaccctccaaatctggattactggagagataggttattcaacgtcgatgaaatgatcaccctaagcgaagaggagtatgcaggctccattgttggaatgattgataccctactagaggctgactcgcacatttctacagattccaaacctacttcccccacgttgacaatgtatactctcatcgctccacccagcggtacaagcgtaaacccttcgtctcccattactgggactgtcgactcaaaggacgaccacccggaacccccaaatccgacgacccagaaaaaaagaagcgcaagcgtacggccagagaacgggatctctgccatgttaaaatcaaagtcgtggaatacttcccagtgtccgaaatatcgaatttgcccgatgcagtcgagcccttgccatctaacatcttacctggcatgtatactttctctctgaatgacgactccgcgatccgaaatgtccaaacattcggtatgctcacgcccaatcctggtctaccaccaaatcacccgggatcgaacggtggaagatatttcactatacagcgggtgaatggcaatggtgccaacgggaagaacgacggagtgagcggcggtcatcaacatacgcttgaagaaagtgatcgtgtcaagaaaagtagtgtgcaacgatacattctgaaggaaaagaaagataaaaggacgagagcggtatgttgatcctgttttgttgtgttcaattgcacaagagtatccccgccggctacgtcacaagtctacattgacttcatacttcccacatgcgaaagatcttgtctcatccttttgttttcatttctatcatttttaattgtgcagatttaacacgaaatacacaataggaccgagtcatgtctcgaccaggccaaaaatcataccatacaaaagcaacgggcctggccgctgaaactgcgatcaaacactctgccgatgttaatctcaagctatttgggagctgcttctggtgagatcctcccaaatttaactgttctgacgaaatcttgttgtgtattgacttaacctgcatttgtagcccattcgtgcagcgggtatggatcgcattggaactgaaaggtatcccgtatcaatacatcgaagtggatccgtacgaaaagccccagtcactgttagaggtgaatccaagagggcttgttcctgctttgcgccacgacgactggggatgctatgaaagcaacgtgttgttggaatatgtaagaaaccccgaggagccaatttctcattttcctcactgatcaatcccttgcagctggaggacctgggtgtaggggctgcaatgcttccagtagacccaaagctgcgcgcccattgccgattatgggcggatcatgtaagtagacacacaggtctgttctggatcatcgctgatagccctccaggtcaatcggcatatcgtgccgagtttctaccgtatactgcaagagcaggaccaacagaaacagatcgagaagacacaggagctgcgagatgcgatggagaagctgctcgaggtagcgcatacttcggggcccttcttcatgggcccgcagatgtcccttgtggacgttcaagctgcaccgtggatcattcggctgcggcgggtcctgaaaccataccgaggatggccagatgccgaggagggaagcaggctggccatctgggtgaatgcaatcgagactgatccgcatgtgcaagcgacaactagcacggacgagttgtaccacgacagctatgagcgatatgcccgtgagtatcgctcccatgcctttttcaatagcattgctaatgcttcatgtgacagagaaccgtccaaatacatcccaagtcgcaaatgcaattaacgcaggacggggcctcccttaataccagaacaacgatatctgatggcgtcctgggacgaaaaggtgttggccaaatgtacattagcctgttttagcacctcgattgaaattgaatccacccctcccacttgcatcagggcctcgaggactgcgcaccggctgctgtggggcttgagtgtcggagccgcttcgctcgacttgcggacggccacctctctgtaggaagggtgcattcgacttggaagtagagggatcgtagagatgtctggacttgctcgaggtcgacgaggagtctctcttctggtgatctcttccgccgccacgtccttttcctctgaccctgccctcgcctgtaggggtttgacgaggtggagtcgtactaccgcccgacgaggtacccgaggctgtagcagatgggcttccaaatagacgttcgcgcacttcttcgtacttccgctgcttctcctcccgattcttcagtgcaatagcatggcgctcctcgggtgttggctggggcggcttagtgtcatcgtccgagtcgtcatcttcgtctagtccgagtcggccaaggccagccgttgcggcactgattgttcttgaagatgatgaatgtcttgtcacaagctggggtttccgactcagtagtgtaactgcgggcttgaagtcttgcttaagaggaacatcggcgcgcgcttcgacgaagtgaaatgtttctgcggattcactgcaacacagttcagtctcttgaacaacccaaagaatgacaaaagttaggtggcgattgaaacttacgcttcagcccatagctgacgattgaactcggcctgttccgccctgcgttgcgccttggtcaccttggatgagactttcttctcggctggcggggtagaattggagtcgagtctctgtaaacgatgacgatcagcatgccaccacagcttacaagcattgagtagaatttgatagcagactagtgtctgtcccaaatgtcacataattccctgagattacatacatctgcttgattttcccaggaatcctcccaggcatcgggaactgcaccggagtttgcgctcattgcactcataatgacggttgcaggattaagaatagagaaggatactgaaaaaaagaaggacgacaatatgctaaacacgaaggctagcaataactcgtatgttcatgcagcatataaactggggaagaaggaagaagaaaattcatgcgagccccggggccaccgcctgtcgaccgttgatctctccactccccgcgccctgaagtctgagaactttcgaaactacgaaaccgaccatcgagctcatttctgctaattcccaacaatggcgattggtaggtctctcctattccctcacaagctacacgatgtagccgggcacagtgggccccgcgatatcgatagtgctccatacccacatgtgcaccggcctcttattccatgctacaaactagagactccggggttacatctactaacaaacaccttctagaccctagagacccagacggcgactctaccatgacctcttccgtcgattccatccggcccgacgacggcgctagagccggcgctcgcactccaactggcaccgcccaagcttcctcggccggcgttgacgtatcggagctttcccctcctggctctcagacaaagcaagaagctggagtctctgctggtggcattggggctgcgctggaacagcgcggaggagagtctgcggagaaaacggttgacttaaatatcgcggcgtggaagagcaagcgtgctcaagaggaatatcagcgtgctatggagtatgtcattgataaagatttcacgctaggtatgtggctttctatatgtacttcgtctggctgggtggtttccatccatggatgtctgtacagtgtgctgactggatgccttgtgttcagatgaattcggggatccttttgatgaacgtgacttagcagagaagttgctatgaatctctgcatgtcggagaccatctactacctgggcagcatagatatgaataatgagatacgacttgattatttagcttgtagttcttttagtacttttggtttacgatgagctggcggtcttcgctcacctatggtgacatttgtacgcggaattgcttcgaatcactgctattcaacgtaaagaaaagctgctccaggctcattcggtgcgatctacaagtttcgttgcctactacgcttgtagatgacttttccgaaaagacatcctatacccgagctttagggaaaatatatgtaggatatagcaaatcctcagagccactatatgattccaattggctttttttctatgcttttgtgctctagtattgctatttgtagttctcagttcgtagttagtagcttgctagtcggtgaagatatatagtcaagatatatatcgaattatttactccgtactatttgatcgctggcaaggattgcaattaatcaacagacgtcaccacaacctccaatgaaatcccatacattcatgctatgatcgcccgatctccacgttgggctctcccatgcagtggttggcagggcaaccgggggaaagacatcaaagcaaaaccccaacggcccgcttcatgactttcacatctatcacgacaatccgacaatccgacattttactgaggggcaggctcagttgcatccttcgattcacatttttaaagtagatgacttgccttgattcatttaactcgaacatacttggtccaacatttcaacagctttgacacattccatacgcgtcaacaatcatggaaaaccatcctccttcaccgcaggcatggtaggtcaattgtttctttcttgctgcttttggattcaatcttttttttcttctttcctttcctttgtctttgaatgatcatactcgcctgtcgctcaggtgtttggtcccttttcccctattttgagccagaccgctatacagacttgagactaacgcaactgccttacgcgctagcagctctgccacaaattccactgaaagttccttcagtttcacgcctatcaaagccctgagcgccttgccgcgactgtgggatcgtaaaccttctacgcctgtcagggcaggagacaaaacacgaaagctgtggaagcgcattcgctttccgtttacgagcatggttaccacgacagaagtccagactacgggggtcggcgcctctaaaaactcagattatcagcgtggcgtgaagcgtctgtgtgttgattccaccggcgtggaccaagacactgaggctgagcgacgcggtcggtctttccttgagactaaatgggagatgcaggcatctcgtaaacgacgtaagtttcttcctcgattatgggggggcatctgcacatcgcacgtggcatcccgtgctcctgcatttagaaagacctttcatctgataatttgcaggcaaaatgcccgaattcgatttcaacatccacgacgagggctcccaggaggtgtttagtttcactgcgaaccagcccaaggagacgcccaatgatgctgtcggcgacgtagctacgaatgcggcaccccagtcgctcagcgatctgtggaagacttccaagacgccggtctataacgatgccgtggcgaccgacctaaatcttactgcatctgacgcgaagacagcgcaggatgtgcagtctagatcatgcagccaagacgcgccgattgtgatcgacaatacaggagtcgacaacaccaacttcgtgtccaccacggaatccgtgcaagcactgacgcaagagcaggaggtcaaattggtacgatcggcactgcgaagctccttggatggagagaatgcagagctgctcaacgactttctgtccagggcgaatgcgaaacgggccgccaaggccacacatcccggagatgcgaaatcaacggagatgggttctagcccagaggagtctccagaagttaaatgctcaacaccgccaccacgccgcgtgttggaggaattgacaaccaactcaccttcacccgtcaagttgcagttctcgcctagtaaatatgacgtcaagcgtggtgccgatggtgcgggtgagcggggggatattatcaccaaggaggatatcattccgaaagagatcatgggagaacaagctcctgcaagccctgcatgtcgtcgcagcacccgtaccaaaggcgtgaatgccccgagcatgcgcaacacgatctcattccgccgagccaaaggcacggaattcgtttttcaacagcgaactgagagccagcagatggcaatggccacaaagcgcaacacccggctcaacaaaggcaaagctgtaactcctatagtcattttgcaagcgctggctcaacagccgagcgaggaagagctgttgccatgcaatttacaaaatgagggctcgagccaccaggacactaacaccggtgcactggctaaatcgcgaaagcaggtgtcgtggaatgaagagcgcatggccgagtatgaagaatacagagagccaatggacgaccaggaggatgaagaggagggcgatcggtgcacgaatgacgtgggcgcaacgcctcgcccgcaagcagaaagcaagcgctcagcgaagaaagcagagtccggtcatcgcagcagccgtagccaaacgcaaaaggccgacgcgaatgcagacagtggggccaccgcgagcggttcaaccccgactactgcagctgctactgtaaccccgcgctctcgccgggtgaggcgtttgggtgattcgggaattttggggtctggacccccagttaagactgcaagtcgcagcacaagcaagcctcctgcagcctcgtctattgtggctgctgctgccccctccacacctaccaagggccgccgcaagcttactcccaagtcccccattccctcaaagcttcccgcacgagcctccaagagtgccaacaccgcggaccagcctttcgtcagtgggatccccactcgcagctcacaaagcacagatgatgcacagcgacagagtatgcttcagatgagtgccgggtgtacgcccacggctcggcgcgttcggtcgagatattattgattggatatgcattctcattggattacgactactcttctgaccgttctataccccggttcccattgtgacgctctttatttatcgggggagttgctcgtgttttaagataccaattgctgtttttttttctttatttcatgtatgcattcttattgaatttgtaaattgttccctttccttcaccttcatcttgatcaagataagattcgctgcacggttcacctgctttatgcaaaatgacgtctgtgccgtcgcgccccctcggctgcccctcggctgcccctccaaccttggaaccttcgggatttgtctgagggatggaatttccaatctcagaggttgtgctgtcctgttttcattcggactacattcggactacgatcttcgcgttgaaaccaatattatgcacctaaccgcattgacaagctctaatagtctgttccgttgatccctcgtgccagcgaatcatacgaagtactccgtatatacggctgccttccaaggctgttacctgtactgatagccgatacatgctgatcgttgttctggtatttgcaaattgtctctaaaccgagctgggatttgcaatgtctttcatacaatgcgtattgtagatgcagttgtatctcatatggcgtcctcgtcgagcctaccttctatgttgtagtacgaacatgtccaatatgaagattggaatcctacaccagactgctccaccccaatgatgcagtactccatatgctacccactccctattattgaggctgggaaacaagttcacaatccggctatgtgcattccaatcctccgaagttcctccccatcggctcgtcggtcaacccgacccaaaaggtctcagattaaaaagtcaaagagcgtttcatagcccaaacaaatgcggcattaaaccccatacagaatcataaataaatccgatcaatcggcccaatggaaagaggaatgcacgtactccgtatagtacaatacaacatacatagatactacctactatgcacatgcaacatgcatacatacggagtcctccccgtacctataactataaccatcacacccgataaaccaatagcgaataaccccccaaaccgccaagccccattccaacgaaccacctcgggaccaccacaatcaaactatccccatcaactacccttaccctattcggcctttcggtgttagccacaagcagtatgccatccgactgtaatctgtaatctccaaacatcacacccgccatccgatatctcccggtggtgtggtcggtagtcagcaacgctaagacccgatgcggtaagtgcgcgcacaactaagcgccttaagtggcgcatggggttccgagagccacatgggtcaacgcgagatgacatcgtctgcagggctcggagcagtgtgctccttgctccttgttttgcattttgcacatggaaatgaaatgggagtggaattggaaatgatatccgctttttagggttgtatttttggggttaggccagttaaatcagttaaacaacttacaacatacaatataggttgtactatgttgtatacgatggttgtatggtttgttccacttggctgcttttgtatcgctatttccgtcttaaggtgttggtgttggcttggctttggcccttgtcaggtacggtgtaaccctactttggcttttggattatttttcttcggggatttaattattggttggaattgttaaggtgtgaagaagacatagtctatgttgtatactaacactgttacaacggggtccttttgcaaattttgcattttcggtactccgtaccaccttccttaatattgggtaatcttcccagtccggtttgactcgccttgatggtggatttggggcgggtggttgtggcagccggtgtatgagattaagtggtcagtgtcagatcaaatggaagaggcggctcaaatgatacacaatctacagtacggagtacagctgaaacacagtaaacacaataatagagtaagatcatggtatgtccaattcatctgatagagttcgctagtcctttcattaactcatttccacccaccccccttggggtattgctcggggggattattttcgtctttttgtaagatggtcaggaccaaatctagtctttgtggggcgcagtgtgaagaggctcctcgggccagttgttgtagccgaaggtctcgtgcatgttgacgaagcgagtgtgacggcccttggccaccgcattcacagcctcaaagtcttcatcggcgagctcaatggtctggaagttggactcaatgcgcgccgggttggagctcttggggacgacactgtatccacgacgcagaccccaggcaatcaggacctgggcgagcgtgtggccacccttcttggcaacatcgttcagggtcttgttctcgctgacccgctcgcctgtcgtggggacctggttctgcgagcccagaggcgagtaggcctggggcaagatgttgtgggcgaagcagtactccaccaaggcctcgttgggcaagaaggggtgaatctcaatctggttgagcataggctggaccttggcgtacttggccatggcttcaagctgggggatagtccagttggacacaccgatggcccgggtcttgccatcggcgtacagcttctccacggcgcgccatgtctcctcgttgttctcggtcaaatctttgaggatcacgtgctagaacgggttagccgggagctggtcgtgtgctttgcggggaaagctcttctcacctttccatcgggaccgatcaacggcttaccctggccgtccttctcgcaagcaataggccagtggacaaggaagaggtccacgtagtcgagcttgagacgctcgagagagttgttgagggaccagaggacgtcatcgtagcggtgcaggtggttccagaccttggtgcacacgaagatgtcctcacgcttgacggaggggttggtcttgaggaaatcatggatggcgtccccgacctcaccctcattgaggtagaaccacgcgcagtcaagctgacggtagcctaccttgagggcagtcgtgacggcggcgtaggtctcgcccttggagccctcgttggcgaaggtaccgaagccaacggcgggcattttcacgccgttggccaatgtgtaagtctttccagatgacatgattgcaatgtagttgttagagaacagaagggaaaaagtacgcagaaagtacgagctgttggaagtagaagataaaagtgggggaagcggtgttggaagtggggtaaaaggggttggaggggcagaagaaccttgggaatgggaattatataacactttttcaattgaccttggaattgccgtaacgatgcaatctactgcaacttagcccgacctgccctgttccacctgtcgatccaagccactggctctgatcatcctgctctggcagagtcaaagacaccatcgaatccccaaaatgactaaaagaaacgaaagcgaggacaaaaataaaaagaataaaagaaatcaaaaatcaaaaccccaaaaagaccgctagtaattttcaaagctccgtgcgatgacatcatcaaccgaaacggtgcgcttggcctgatcgtcatcggctccatcgatctcatgtcggcccacgggtgcactgcactccagtccaatcgtctgcccgtctcaggcctctctctacccactcggcgtgctgggttgcttcacattcggcccagcaactctggtcctggccaatcagcgtctttctgattttattaggccgcgggaagcaacacgtcccgtgtattgggtacctagcaagacacggtgccagccacgatgacgcaggtaccctatacacgcctgtctcgttgcgagaaaacggtccaccctatcgctcgccaaatgatgtcttgccaaatgatgacgataattcctaggaatgatgatacccggtgagtggatccttcgtaacctcaatggcaaaataccaatttcgtttgtctccattatttgcgtccggtatcagatatcgcttgtatatatactctcctgaactccctcctccaccacctcccttatcagccaattttcattccccttctccctttttacaacttcaattctttccttgagtcctgaatccagtgactcccgagtagaagctcatcccatccttctacccctctatcaaactctatccaataccttcatcatgtctcgcgtcgaggactctgacctcgcagtcgacctggctgagcaggatccccgcgcccaggatcctcagggtgccctctcccctcgggaccagcgtgctagctccggtctcgccatcccatcggcaggcggtaacaccgtcgagatccccgccacccgcagcgccatcagtgatgccgctcaattcatgcacaacttgagcttgtctccctccatgagggaccgccggggatcgcgtaactcctttggcacttcgctccctatcccccgctccccccgcatgtcccgcctctcgtccgtgcagcgcggtgctccctcagtctcccgcgatatcttggcctctcaggttcaggatatcaacaaggagctgactaccaaggcgaagaacatggcctttgctttcgatattgatggtgtgctggcacacggtaaccacgccattgacgaggccaaggtcgtcctcaagatcctcaacggcgacaacgagttgggcatccgcatcccccacattctcctcaccaacggtggtggtaagaccgaggaggctcgctgtgctcagcttaccgagattctcgagcagcccatctccaccgaccagttcattcaatcccacactcccatgcaggccctggcagagtactaccagaccgttctggtcctcggtggtgaaggctttaagatccgcgaggttgccgaaaactacggcttcaagactgtcgtgcaccccaaggatctcctcgcctgggacccctccatctccccctgggctactctcaccgaagcagagaaggccgaggccaagccccgcgacttctccaagatgaagttcgatgccatcatggtcttcgctgattcccgtgactaccagaccgatatccaggtcattatggatctgctgctcgccgaggacggcatgatcggcaccaaggccaaggatcccgtcgccacccgcattcctatctacttctcccagggtgatctcctcatgcccaccgagcacaagggtcttccccgtctcacccagggtgccttccgtatcgccattgaggctcagtacaagacactcaccggtgtcgacctcgagcgtgttgtctacggtaagcccgagcgtgctacctacacctacgccgacgaggtcctgaaggcctggatggaggagctccacggtgtttcccgtctgcccgataacgtctacatgatcggtgacaaccccgcttccgatatcatcggtggaaacatgtatggctggaacacttgcttggtccgcactggtgtcttccagggcaaggagggcgagaatgaccccaacagccctgccaacttcggtgtcttcaacaatgtcctcgaagccgtcaaggctgccctcgccaaggagctcggccccgacttcaagctcaagtggaaccccaaggtcaaccccgtcactcacggcgacggtgcctccgccattgagtaaacaattgatcactctgatcctttcacgctgaaacgaaactcgaaaaacatgtgatactgggcttgagaaggatttcctggcgtttcgtgctttttttcccccatatcatagacttcttttctttccatttctctgttaaggccttctgatatcctttgtcatgtcgatctggattatcgacttgatagactgatatttgctttcttttttttacaatgtggatggtcgatggtttcgacctgcttttttcccttttagactggattgctacatatctcatgtgccatgacgcgaataaccttttgttttgctatatcccgatactccaataccatatcaccagtttttatcattgatgtcgtcaattaaatattcttaatttgtattcctttttctagaaaactggtgtattccaaaagtttgattattccagaaaaagcactcattgacgacatggtgatgtattctccttagtactagacctcttgtggagggatcttctattatttcccacgtctatatccaggtctatccatggatgcgtgtagttagtattctttaatacttgacttttacacatgaaaacaagcgtcagaaacaatatatttacagagaataatatcaaaatccatatccgtcaaatttgtacactttcgtctagaccacgcctggaccactaatgtttcgggaaacctggaaccagaagaaaagcaacaactaacgtaagacatcgatacaaccgccagagtggcaaacaaatacccggcattatctcaagacacgcacactgtgagtcgggtaggtacacaatatttgagcgggcatgtatgtgcctcagcaacgaggtatcggacgagtttattgtctcgattgcgcgtacgctggctgagtcgttctttggagggcgttgtaagctgcagcctgcagttccacccatatatcataggatacatatttgcatacagagaacttttgcgggctcctttgctggtttgcttgttgttgtcagtaagcaattgaagagcgcatgccatatcatagattcacacgaaaaggaatccagaatccagctctactgattatcccacggttttggacgcgaacaagaaagcggaaaggcgcaaaacttgtagaggaagactagttatataaaggaggactatgacagttaagtctaagaagaccaagctcagatcagagcagttctgtgataaagtatattcagacccattgctcacccaatccgcgactatctcatcgccgtattgattgatcgaactattgtataattcaatgagaaaaacccattgtatatcctagtgtaacttacggatcggtcagacatgaaagacctgtggaataaagatagcgatccgtcataaatgtagctggctacaatttagcacgggagttgtgagatagcgactctaatagacgagtatcttactaggataagcaatcgaaccacctcgaaccataacatcggttgcctcagtgcatgcagtttaaatggcttctcgcaagatcagagcgacatgtactttcacacagggcgacaagttgctcgctagggacaatatcaaagcttgcacttctgctagatatcagcaaactcaaccctaatgacatatctgtaccgttacgattccaagaaacatactcaactccaatgtagccaacccaggcaggacatgatgttactgtggtattgactgcgtcgaagcaggcatcgctcagacccagattatcatatggcatttgatagccatcgagctgttggtaggtgactaacatgccaaaggagcccatacaagacacatgattataatcattgtcgtttcttcggtcacgcttgtgttgaccaggaagaaaagggaaagatgagatgagcaatccgtctacgagatagtgctttaacaaatccactcttcttccttatttcctatagcaccgagtccgggaggaaagaaaaaggaatgtcgcctgcgaatgctaaacttttcattttagccaaagctccaggcttaactaggaacttgactagtgggcacagcgggaccccaagaacctgcacctcttgtcgttccaaggtcatcaatagaatttgttccctcaaactagaaccctatcaggtcatgtgatagagacaaggattccttttcggtggctgaaactccaactccttttttacaattctcaacaatgttcaacctattcttaaccgggctcgtggcatttctacaacctgtttctagtcgtataatctctgcattacatcagcgctgtctaccatggagctctctagcgagcctcggccgaatcaccagaaagccgtaacatcagcagacacgcaccatggacagctataggcaaatcgatgcctcctccaaacaccccgggaaaaagcgagatctcccatggggattcgcgatctaccactgttcttaaaaggacgagagcgtctgtaatcgtctactccagtacataaaggaacaggtcaaagccgatcttgaaggcaaccagagaatggaccttctactacatcaccagctggtcatcaacaatgacatggcgaaagtcaatagtgctgcatcccatgagattcggaaccacttcaacgaatgggttgcagatcaactgcctcaggtcgtcgccagccctgaaatgctcgaatatctccaatctcagaaacttcctgatcatcgaggtccacagtacggcctcggtgcgcggtataattttgcctctttgtggacgatttctgcttggagtcaatcaagtatatcaatgattataggttcgatcctgttgtcaaggttctgtcagggttctggggcaatatgactccccaggagagggaataccaaattcatcctgattggcatgatggagaaacagatgatgaactcgaaatggctggctggatgcatattcccatacaaacttatgtgcggtcgtatgatggtctggaacagccgggggattgggatgaatattatgtacggccacccttgatgttgaacggatccagtgcattattacatctagacgaagagctcgctcaaattgaccgtgagttatatgtggtctctggttatggtataaatgctagattaaccgaaagacaaaccaggggattgaactcacaatttcaacgtagcatatcatttgtttataatgtagtggcatttgagcacgaattttggaatgattagttcaagaggatccatagagcaaggagaaggatcaagacaacatccgcctccttgtctagttagcaatgcggagaggcttggcggcatgcacaactccgcggaagcgcaccttcatcacgaagcatgcagtcaagcccgatgctgtaaaatatactcacctcgacaggcaaatccaagtgactcgcacctttgaatctagactgggttgcattgttgctaggttgcatctctagcgcgagaactaagcctttgccaaccccgttgggcaagtcgtacgaaccttggaatgatacagtgcgagtcagcgagccagccggtccgacttcaacccggaataacaaggcaagagattgcagggattgttctcttgccgtaggaggtaggaggtaggagacagaaacggggttgtatacctacaacctatgttgtaggcttcgctttgacagtggatcaggagacaagcaaagtcggtgagagtaggaagtattccgtatggcgtacgtcgaatacgaagatagtactccgtactagcatcacccaattgttagaccaagactagtggattggttctccatcggagctccgaaacctcgagatcatccaattcgcgtctgaaaggggacagccgtggccggccgtacgttgtgggttctcattatgtaatagcgcctggatccccgcatgatcggctccgagagaggcgagttcttgggttgtcgatgtacatgggaggtttagctgcatggatggtaatgcgttaggtaaaaagaactctggggtagaggaatcaggatgcatgggatttgatctgctgacgtgtggatatcagattattattgcggagcgaagcaattatatcatcctactatttaactacatgtcactattattgtattgtcttatatgttgtagttgtagttatcctgttctaaatgtactaatagaatgacggcacgtttccgcatgcgtcaaaaaaagcaactggagtctgcaggggtagctcgaactaacagaacttaatagcttagtgatataagaagtatagatgtagtaactatagaatttatatttatattgctctatttatatatagattaccttcagaatactaagaatactataagaatacaatacagatccgtaatcaatcagtttataaaagtcgccccatgtggccatgacccatggcgcatttcttagcatttcgtactcttcgaccttccacttcacctccattctgtacttcgcccaaagaaccccataaactcttaagccctcctcttccgatcggagaaaaccctgagattacctccaaattcgtgtaacgtcggttcatccgtttctgtgactaacagcttcgttttttttcttccccgccgcccctctgggccctaaacttgccctccggtctcaatacttctttgacttgaccggggcttttttcttttctttttccaatttggagtcctttctcgtttaaatttcggtataccttattatttttttcgttttgcctgctccaaggtactccgcgactagtcactgtacacttagagccctttatagagggcctcttcctctgcaccatgacctccgttactcctgctccttcgcagaccaagccggccttcccccgactctcttcaatcccctgtggtgatcacttccactctcgcgagtcgtctccctcgccctgcagtaccccggacggttccaggtcgagcagccaacgtcgtccctcattcggttctattaaagaagatacggaggacggtacgtaccgcagatgtgcgaatccaggctggaggctgacgtgatcatgggtaatcttaggaatcgcgcaatcgttcgtggacacgcgcgaagtaccatctccccaagacccggaccaagaccaagagcgtaaggtcgagcgccccacccaaatgcagcaggccccggatttttgctgtccgtgtggtggattcctggggtggaagcagattcgattgggtgggaagagtctgagccgcagctacagcgatctccgtggactcggaagcctccaagcaaagggctgggcatgggaagcccaggagccccagactatggagcttctcccaccgaaggtccccgaggtagagattttgcagacccctcctggtaaatcatcgttggagaggttcccgccggaggttcttggtaagaacccgcactgccgttcttgtttctcatgtgctaacgtcttgtagatcaaatcatctctaaccttgccgtcgatctccccccaaatggctacgccccccgcaacgtggatttggtctcgtgcctgctaacttcccatacgttgcacgctgcgaccttgggtgtcttgtacaggaacatgactttcccacactccatcattttctccaaggcactgaatcacatgtcgcagtatccggcgttgggaacattggtgcgccgtctggacttctcgcacttcacctccgtcggcctaggtcgtactaagcagatgaacgcagaaattcagaacctgacctccaagaccctattgcagtgcttggaactcctccctaatttgaaggaatgcctgctgcaggaacacctagagggcgacatcagtgtagaagtggtccggaagctctttatggggctgccgaacttgcgcgctttggatttctgcggttgctcgactcaggctttctctggggttttccaggaggctttggtcaatgggcctgcgctgtccataactttgccgaacctgaaacggctctcgcttcacgaatgcagcgctatccccgctcccatgttcgactacctcctcccgcgattggtcaacttgacgcacctcgaccttactcacacccaggtcaacgattcagctctcgttgccatcccggagactgcccgtatctctcatttgagcttgtcccgatgcacgcgcctgcgcgcctgcgccctggttaaattccttaccacccacccctcgatcaacgattctctcgtttatttgaacctgttgacggacccgacccgcttccgtctgctggaagagaccgatgtgtctgctctgctgccgaatctgcccgagactctccgctccctcaacctgggtggagccaagatcacttcggaccatgtaccacacttggtgcccctgaccaagcacctggaggagttgggtctcagctctgcggatctctcagttgcggacgtcaactcgttcttcagtccgtaccgcaaccctgccacgggaattgaggttgatactcccagcactctctgctatctcgatcttgccaaggtgccgcagatgactatcggagccatcttcaacaccagtacttgtttcctgctctccgacaaaagctatcccttgcaggtcgttgaattcagtgacaaaattatcaccccactgcgtgagcgtgcgaagacccatcgcgcatccgttggctggactgtgcgagacctcggccgtcgtggctggtacgttcgcgaaccctcctccatgccccacgaacccctcgacgatggcgcccgttactggaagatgggtgcacgctggtggggtatgcgcaagatccccatggccaccggcgaggtcggcggcctctacggccactacatgttcaagaaatgatctactatgagcgttctgttctcaaaagcgtcttcgctggatccttttatcacttgttgctgatacccttgatttgatatcctttattttcatttgtgttttattggaggcctcgcttttcttgctttattgcttttcaccttttgctttttgtttcacgatgaatgataatattcggtctatgcatggcggcgcgcaacatggtttacgaatttcggcattctggctcctggcttcgggttcgtgttctcggtcgcgttttgtcttttggttttgcatagcatctgagatctatctcttccggtgtctggtctttctatcttatatctctggcttcatatggcgttactgtatttatcgggattttactctgctcataaatacctatctagtctctacttcatctcttataagttcaatatagttgactcgatctgatagccctgtgtcttgcacttcattgggaaggagccaaccaccgtcccaaataggcaactacctgggacaacatccagggcacgcgttctccagaaaacgcgcccctccattttattctttctcacacagatattttgctttgttttctcaaccatcctgctgaactgcccctagtctaccactcttcagcatgcttctttcactccagtgctataggtaagttgtatttcccatgctcactaaggaacccgaatttaatccaaccaagaggacctcctccaataccacaaggaaccgaaagcccagccgggaaatgaagcatttcgggttgactccctcctctctgctgtccatttccaagtcctgaagagacacattctcgagtcttcgacccgggaccccccgtctatgcgcgggtcttcttacctgggtgtttgccttggtcctgccagagctagcgcatatgggcttcctgtgtctcccttttagtatgggacggagaacaagagcatcactttcatcgctgtgatgtaaccctctgggactttgcatcacgatgaagtcgctgaggagatgatcgacctcccgggtgagttgttttacatgcgtgatctagcatggctatcaaaactaatcggagaaaggagtggcttcttgctgagcagaggcttctgaagaaagagcacatgattgcattgtcggtgacggcgtttctgaatgtgccatcatattgctgaggaacttcgacgctcagctaaggatgttgctggcggatgctagatttgaggactacaacaacgaccacctagtcctcaagaaagaaattcgaaacgcaatcctgcaggaagccagacctatctttgagcagatcgtcaaggaggaacaggaaaacaggttggagagctttctcaaggaccgaaggatatttgccatttgacaacataccgtccatggcaatatttccctcaaaattgatcttcatggttggatgccttgcatgggctggtgccatagttgattgtgatgaactttttgtttgtgctctttccataggaatctttctctctacattcttctcctcactttgtaagtcattgatatctctatctactgttatttttcaaaaagggctttggcaatgtaatttgttctccgttagaattccagcttcattcacttagggcttggctcccaggtgacgcttggcaaacgtcaaatgtcaacgtcatgtgatgaatcgcagaagagccgcatttctcattattggtttcacctctacacgccctgtctctcacgaaggtctcagacccccttcgccaacttccgcccttggggaattgctcatcccgatgggtggattcgttaccgcctttgaagacagtggaagctgtccagacacgcgacgatgtcacctccgagcggagcggcctcttacaagaagaaagatgggaccctagctatatccgccgatgagaagtcggtttcatggagtcctgcggtcgcaggggccgggaatacgatcacaatccccgtggtcaacatcactagtatgcacccaccccaccatgcacaaggtttgtctctttgctgactcgcgcgactgctagatctacaacagaccccagcctcgaacccgaaagtgatgctcaagatcttttcccaagcctccgatgcgcctccgaatagtacgcccgatcaatatgtcttcctgttcacggctggagcaaacgcccgcccgcaggccgatgtcatcaaagacacattgagtgctcgagtcaatgcggtgaagtcgggcacgccatcccagacgccgggagcaagaggtgcgtctgagggactgtccgcggcgatggcgattgcgaatgctgtgacgtccgccgggacatcgaagaaccccgtggacgaggagaataggcttcggtccgacatagaactgcagcagtcgctattacgatctgattcgaatctgcagcggatgtttttcgaggggttgcatacgaaaccggaagcgttgtcgtctggatcgtttgtgtcgcagttttggtcaacacgactgcatttactgcgcgcgcacgcaatcgaacagggccaaatccgtggctcgtataatgtgttgtcttcacttaagccgcgagtcgaggataatgtcacgcggttaaatatcagcaaagagcagatccagctcatcttcacgcagcacgcactggtcaaacgcgtgtacgatgagaatgtgcctaagctcagcgaacaacagttctggtcgcggtttttccagagtcggctgttcaagaaattgcgcggagagcggattacggaggctgatgcaacggatgccgtgctggacaaatatctccggacggacgaggctgctcagccggaccgcgacacgaatatccatcactttttggatctggctggcaatgaagtaaatcacagcgagcgtagcggaaatcggcctgatctagatatgagaccgtctggcctcgacaaagtacctatcatccggacgctgaacagcttgagtgaaaagatcatggccaacgtggctccgattgacggtgatatgagtgccccgataggcatcaacgaagaggcatggaaaagactccagctgcaggatctttgtagcgaagaacatcaaagtcccatcactctgaacattcgtgatcaaagtcgtttcttcactcatggccaagaggaggataagaccaagcaattcgtgaaacaagatccggagcagcttctgcagattctccgtacggagatcaatcaaaatctcccatcgcagggcaatacacaactaggcaagctggtggacccaggcgatgacgaagacgaggagatggaggatgcacctgccagccgtcgccctgtcggctcatctgctgctctccacgatgcattttcccagatcctggaagcgttgcgtgagcgtcgtgctcagatgaaggagcgagcgacatcagaaacatacgggctgtcgatagcgctctttgaccgcttgacgttgacacacgctacaaccacagagttcctgcaccagttctggcaggcgtttctctcaggcaaccccgaccgcgctggagaggtcgcgtctttagcagagtctctccatcgagcaatggagcgtattaaggctgttgctaatgacgcagaggctgagcggaaggtcgaagttgaccggctgaagaagcaggcccgtgacatgtacgagagcacggggcgaaaattgcgagtcaacttagaaggcgtggaggggggccagaaggttgtgaaccagcttcttggtcctacgctccatgcactggaggttgcatcgactcgatatcaaaaagaattggccgaacaaaataaagaagcggccatggctgctcaagacacggcggggacatagaagggaacaagccaggcgtttgagattggcgcatgggatgtataatatgataggttataagaagttcaatgattcattcatacagagaaacaaatctcgatatctcattaatctacatagccaagtttgtctacataaatgacataaaaatgatcacagatcggcatgccgagcttccccggacttcgggaccttcatgccatctgtcccctcaactaactactacactaaaccttctccaactccccctctccccaaaatcggatgattctcacaccagatccacactgaagaaaaaaaaggggcctcaagatgctcacctccggcctcacaaatgcgcccctcaccaaagcgctcctcatctacacgatcgcctcgtccatcgctctctccctcttcgacataaaacacctcgtcgtgatctatgtctcgccccatttctggccctactcccagttctggcgcgcattggtgtggcaggtcgttggctttaccaattccagtgaggccctcttcgccgccatgctagtttaccatttgcgggttgttgagcgcgcgtgggggaaacggaagatagcggttagtctttcttttattgtctccgtccccgcagctatgcgaaccatatgctacgggaaacagagaagccaagccgaatggcttcatatacatacgacctatgctaacaacgataactgctcgctagaccttcctgctcaccacactcccctacacaactctcctcccaccaattctcctcgccctgctactccgccctctctccctaaacaatttcaattacctgccctccggcccaacagccacgatcttcgcgctgttggcgcagtaccacgccaccatcccatacacataccactaccgcatcggctccacatccacatcctcccccaccacaacaaacaccaccgacaccaccaccagcaacgatccctctaccgaaaataccacatccccatccgaccctaaacccccaccaccaagcctctccctcctcctctccgacaaatcaaccacctacctcgtcgccgcccagctagccctctcccagttccccgcaatgctcctcccctcggccgtgggctggatcgtcggcgtcgcctggcgcgcggacctgctaccgggtctgtcgccggccagcaccggattccgcgttccggcttgggtcgttggcgagcaggagcggaggggtggggctggggctgcgtctggggcggagagggagaggtatgaggatttgcgacggagattggagggggaggttgcggcttcggcttctgggctggaggggtctggggcacaggctcagagacgggcgaatactgctggtgagggtggtgggtttgttagtcggttgacgcgtgattggtagtttcgcttgtttttttctaagtgagcttgcatgcaaggcttgtcgggcattttctatctggtatagatgtatgattgagatagttattgggtcttttgtaggaggtgctagcccgtcctcaaagccctatattcgtatatcatcattgattcatagtgtcccccaagttcaaaatctcaccaattcataaatatacaatacgataatacttgatcaaagaaagaaatgcataaagtctagaatctcaactagcaaggccgtatctccgctagagtatgtgccaattgaaaacaccacataacgccatacatcatgtctataaccctgaacggaatattaccgtccattgcgactccgtctcatattttccttgcactcgttacaataccattttactaatagagacgagactgttagcaacctgtatgattccaaggcaaagaaaaacctcttaccattcttcccaggcggtttcgtcaagcccacacacgacaaatggaaccattcacgcggacacgcgtcattgtcgcaagcaaccatctcgccgaaactgatttcgttacagtaacagtagcgcggctcgccctcttcgtcttcatcgtcgccctcgtggagcgactcgtcgtcggagggtattgcaggctgtgggatgggctttttctgggttcgtttggtagacgctgggtctcgacttcgcgtgggtcgtgcgtgttgttggctgggctctgtaaatgcggtgaggacaggcgttgatgtcttggaattgcgtcccttggtcgtctcgacctcggcagaaccggattttccatccagatcatcgcgcttggttcctgctggaacggatgttctaccgttggcatcaccgtcgtagtcacggtgtgggtctgggtggacaagttcatttttaacgggtccgtcccggggtgtagatctggaatcggcaactttgtctgcgtggaggacatggttaattgatagttccgggggaagtggttgaaacggcatactgttgttaggaaggtttgaagccgatgacgatggccgcgcacgcgaattgcctggtccagaattctgggctcgtgaagactgtggccttgttgtgttgggtcctggactagcggcagcccgtgggccattgaatgttccaatcaaaggcgatggggccagaacaggagatgcagcactagaagcgttggccctaaaaaaaagtcagttggatgcagcagtgaacacagcgaaatgagacgtacttcttccgggcagcagcggccgaattaggagcgcgagtccgcttcttctctactggttctttattcgcggctctctggctcccagcaccgctagcagagcgctccatcggagcactagtgtcaactggcagtgagcgctccaccttccgacgtttgggtgcagcggtggcgtcagccgcgtgatctccaccccgagatttcgcattgttgttcttgcgggtgcccgagctgcgcgtatcctcatagtctgcgtcggcctgtgcccgacgttgtttccgagccagaacagcatcgcgccgcgcctcactgcgactagcagcttcagcctcttggagcacgtgcgacagatcctgtctttgcgctaccgcttcccggcgcggacgttcattagtcgctgccttcgcggtactcttgttggagtacgcccagtgtgtcaagctgcccaagcgagcctcctcgctgatctcgcctgcaatgtatgggaacaccgtatccagtcggacaacctggcgatccaattcctcgttcgcgttcgaaatgacgtgattcttctcatcggcggtcatcatcaggtcggagaggctttggcgtacacgatcgaagagaagccgacggcttttgctctcggatgtttccggtgattgggatagttcctggcgcaagagtggcggtattagtagacgccgagtagacaattagacgaatcgcgcgggaagctcaccttgggcaaaacatcctcccgaatcacacccccaacgataggcgccgggtgtgggggatgaggaacgggctgcgactgggaggagaacttgagtaattgcagtagattttcctcgagagcccacgccttcgcatcaacttccttgagaagagagttgtggcgacggaactcgcgcggaagcgctgttatcgcatcggtgaaatgcgtgagcgcaggatagaagccgtggggaacagggggcgtggaaggaatttcagctgtcgagcttccgccgaacgcgaaggatgaccgtccggtggttttggagattcgagacgggtttgtacgtgtctgacgggcggactgtcggattccttggcccggcgtattgttgactgacgacgagacgacggacgtcgtgaagggcatagttgttgagactggagctgcgccgttggaggagagttgaggtgagcctaccccaatttgaggaggaaattgtgagatctgaagaatcaatggtgttcagcaatgacctgggaccatggacaagagtcaacacctcgcgtagcaacaaaagggcatcgatgcagaagaaactactgctgaagtttgcgtgcggagaagagcgattggcaatcgaatcaggtgatataggtgcctgcagcattaatcaggcatcagttgctgaatcatccgagcatgtgggtgacgtcatatcaggaacatcgcatacaatcaatgcaattaatgcaatgcatgtgagctacggtgatttgttagaagtttactctgtagaacattacaaattacaattaatgcaatcgatgacattataagtggaaaataaatatgcgtctagtcaaggattctttgtattttacatatagcgtgaatctaggtatagaaggagaccttgtattaggacaaccaaaagactgtcctagcatagcatgactatgaacctaggacacatctaacacacaaaggaaatcagaacaataaaaagaggtagtacaacaacgaattacacggtaggttctaggaaaaccgatgaatatatgacacccaactcaatgcaagtgtcggtgcaagatgccaaatatctcatccacagaagtcggatcaaatcgctaaaaaggcatttactcgttcttcaggtgatcctgttcaatagagaaagcatcctcaaggaactcctgctcctccttgaggtggacggccttgagaccggtggcaacggaagcgctaggagcgcgaccggcgtacaggacatggcggcggtggtggtgctcggtagagttgagcagggtttcaagacggggctgggtgtatgaccaggaaccggcgttgagaggctcctcctggcaccagacgatgttcttagcgttggggtagctgtccaagttctccttcagctgagcccaagggaaggggtgcagctgctcaacacgggtgatggcagtgttggtgatcttgttggcctcgcggtgcttgatcaaggcagcgtagacctgtccagagcacaggataacacgctcgatcttctcgggggcgtcgatggcggcggcgtcatcggggatgatccactggaagtgggactcgccttccagggcctcgatgtcagagcgggcaagggggtgacgcagcagagacttggagaagaagatgaccagaggcttgcggaactggcggtggatttggcgacggaggatgtggaacaggttggcagggctggtcatgcaggcgatctgcatattgcagtcctggtgctgacggtccagcttgtcggccgaggggaacacacggggctcctcgttgcaaagctggagccagcgctccatacgtccggaagagtgctcggggccctggccgtcataaccgtgaggcagagacacaaccaggccggaacgctgcagccacttggattcaccagaggcgatgaactgatcaatgatacactgagcgttgttggcgaaatcaccgaactgagcctcccacatcacaagggcgttgggggaggtcaaagagtaaccgtactcgaagccgagactagattgcatgttagaattattattacgcgggggaagtcgacttcaaaaacctaccaaccgtattcgctcagggaggagttagagatgacgaagcttccctggttctcactgacgtggtgaaggggggtgtaagtgctctcagtctcctggtcgtgcaggactgcgtggcgctgggagaaagtaccacgctcaacatcctgaccggagacacggacgtggtagccttcctcaacgagggaaccgaaagcgagagcctcagcagtggcccaatcgatgttcttgccctggtcaacggccttcttgcgtccacccaaaatacgcttgagattgtggtggagcacgaagcccttgggaacaccgtcaccagagatcaggtcaccaatgtgctgtaggttcttggcaggaacagcggtaggcaggtgaggcaggacctcattggccagctccttgggagacttgaagttgttccaagcggaggtcagccactccttaccagtgggctggtagtcatcgctgcgatcgaagctgtcggcgagcattccccagacccacttcttgtgttcatcaatgtcctccttggtgaaggtaccctcggcaatcagcttatcgacgtacttgtcgagctgaggcttctgggcggcaatgcgcttgtacataaggggctgggtgaacgaaggctgatcagtctcgttgtgaccctgcttacggtagcagaccatgtcaatgacaacatcactcttgaactcagcgcgccagtcggcagcgacctggcagatgtagttgacagcctcaacatcgtctgcgttcacgtggaagacaggggcgtcgatggacttggcaatatcggaacagtagggggtggaccgggagtaacggggatcggtggtgaaaccaatctgattgttcacgataaggtggatggtaccaccggtggagtaggcagggagagagtgcattcccatggtctcgtagacaacaccttggccagcaaaggcagcgtcaccgtgcagcagaacacccatggcggtgtcgaagtgagactcgtccttgttgtagtgctggatagcacgggtctttccaagaacaacagggtcctcagcctcgaggtgagaggggttggcaaccagagacagctgcactcgcttaccggagggagtagggcgctcaaagttcatacccaagtggtacttgacatcaccggagccctcatcagaaggctcagtagagccggagaactcgctgaagatggactcgttgggcttgcggacgacgttggacaaaacgttaagacgaccacggtgaggcataccaatgacgatgtccttgataccgtaatcgacgctgcgatcgatcaaggccttcataccgggaaccagggtctcgcaaccctccagaccgaaacgcttgtcgttggggaacttggtagcgaggaatgtctcgaagctggaagaccagatcagacggtcaaggatgcgacgcttgtcgtcaaccgagtagctgtaaggctgggggacctcgaaacgatcacggatccactcgcagggcttgcggtcgggaatgtgaatgtactcgacaccgtaagagccacagtagatcttctcgcaggtggcgatgatctcgcgcagagtcatggtcttgcgggtttcggtgatgaaacggggcaagataccgggtccaagggaaaactcctggtccaaatcacgctcagtgaagccgtagtggtccaactcaagctccttgggcttgtcgtagccaaaggcctcggcctctccgcgaatgccgagagggtcgatcttggccttgtggtgaccacgcgcctggtaggcgcggcagagcaactggaccttcaagtggttggtgacgtcagcgccagcgtggaggcccaggccgggcatttcctggggaacaccaccggtaggggtggggacaagggtagggggaggagtgaaggcctgggagataggcattttgccctcttccatgttcttgaagtacgcctgccatgagatgtgaacactcgaggggtcgttcttccatgccaagtacatctcatcgatgtaattggcagtgctgccagtaaggaaagaatcgttggggtcctgttcacgtaagagcgatcgcgccgtcgcattagtcgaatgcccgttgatatatttgaactaccggggaaaccggatcggattgacaccgatcatgaggattgttgttgcttaccactccttgactaggtccctccgaggaggccgcataggaccgggaaccgttgaaagcacggtcgacaacagccataggccgacgggcggccaggctgaagccggagctttttgacgtattgcgagcagctgtggcgaggtggaatgaacgccggcatgatgaagaggtcgcaccacgcagcatgccgctgttggtggccttcaaggcactgtttctgaacattgcgggattttcttggatcaaggtccaataaagtatttcgaatttagaggagaggagaggggaattgggaagacactagttcgtgtttctgaccaaagagacgtttcagagtcaggttcactgtatgctatcgtgttagcctcgaattgccaggttgtcctgtagtgcgagcaagccggaatacggaggaaaggaagggacgtaagtatacgtacgaattaaatcacaaatcaggtgtcgactagtattgccgtagcacctgtatagacgcgggactcatcagagagctacaacgctctagataagaaaataaagttaggggaagtggtagaagaaagatgaagcgagagaagagcgcaaaaggatgagctgccgagaatgacgggtgtgacggcagctgaagctggtgtgctgagtcagcccgagttacagccgatgcaggagccacctatctagccctttcgaccctttcgaccactttcatacgcagaacctcgggagagccccgaagatgcccactgctttccgtagccggctaaagcttttgggctgttgtccgggaattttcggcccaatggcactggaagtgattgcgattacatacatctccctggcttcccggatttccctgcttttccagcgccaagtctttttctggctgtgagatctggttgggatcggaattcaagctttgtttctatcagattgcgatcgctattaaaattaacgtatgaaccgacagtcgataattcatgaaatcgtcacaccgcacaatggccatatgcagagaaataatagatcgttagagccagatttacggatgtcaggcaccatattacaagacattgagtcgctgaggtccactgttgggaatttcttcagaatctggccgcccggacaacggcgaagtagtacgtggatgactgtcgtcatggaaataaccgacaccattggaaactccctcatcggggctgaaaggcctcgtttcagagaccgttgggcttgcttcggcaccgttgaggctggcgcggtgagagggcgacagcggatgcggtgggggactacctgcactgctgcgtaggctaccgttgctcccgccccaagccccacggcgtagcttcatgagcgcgcccagggtcatctcatcgtcgagactgcccatgtcaaccagctgcgccagcccggggctcgctagagctgaatttggatgcgtactgccgtgggccttgatggaaatcatagagttccgtgtgctccattcgctccgttcagtgataggggtcaaactgggttcttggaatttcccgcggctgctgtggttccgtgtgatgccttcgacccgtcgcggaccgaagtatccaccgttggttagctcagaggcgccggtgccatctgcgtgtgcgtagaagccgaactcttgaccgtagaagccatcgtcgtcgttctcaagagcttcggcgttagcagcagcaacgatggcatcgtcaaaatacgaatcatcgtcatcgtcgtagaactgatcatcgtagacctgatcatagacgttgtcaaaggccatggcatccgcaggttgcccgacccggctgtcatcagaaatcagacccggttgcgagtctattgtcggcgatatttgacctgtgctgtcttgtccctcggatccttcgctcgtgccgaactggcgctcgatccggctactatatgatgcttcattggctgcgaaagctagagcattgtgcaaaatatctagattttgctctgtgagcacacctccaccatgggcacgaacagggcccatatttggtatcggctcgccgagaggaccacgcttgattgatcctgtgacccggtagtcactagccacactaggcatgtgccgcagtgcttggtctcccatttctgccatggggctttctttccccgaagagtcgtccccatcagggccgtcggggccgtcaggggcgtcaggggccgcactgtccgttggtatgggtgctgcagggggagcgaccggttttctttcgtataaatgactggttacgtcatcgaatatagattcgtcaaatccactatcttggttatcggcagcaagatctccgaaatcgccgtcatcaaaataaagatcatcatcgtcgtcgagaattggagccgcttgctttgcaaccggaacctcgggaaggcttgatgtcgcatcagttctagcagctagggacggctgttcctctggtagatgttgctgggggccatgatctagttgtgtggcctcggatagacgagaggctgagtaagatgggttttggtttgggtatggcagtgcagcagtgagcgggctagcaacagtaagcgggctagcaacaatgggtgacaaccccgggacaacccaggacttggccttgttgatatctcgcggaattgagaaatcatcgaaatcgtcatcggcatctgcattgacgccagggatcctttcttccagaccatccaggtcatccagcatgtcatcatcgaagtcctcgtcgaagtcatcgaaatacccatcctctattttgcgggaggcttcctttgccttgtgcttctcttctagcattctctcttgtgtagatgattccactccgatcatatcgaagctgaatcgggacgcattgctcttgagatgtctcggcaaggccgaggggttgaagggtacattaggaatagtatcttggtcttgagggtgctgaggatgagcatgcgagattgttgtgggtgatattggaggttcctcggcctcatgctcacgctggtccgaaccatctatagttctgtctggtagatgtgaaggcaagttccgcgcaaagaccggcaatgagctatcataatcaggctgcgattggcctgttaaaagtgaagactgaagataccccttattttccacctgtagaacattctggtcctcgaaatgttccttgaagacaggcgaatgatcactgtgccgtttcgcctggtcattccaactggcgccacgtggttgactaggtatttgcggtggtgaagtatccggcccattcagtgtatcctgctggggagccgaaaggttgcggcgaggccgaggcgccgagaagtcatggacaatctttccacgaattctaggatcatagtcatccggcatcggcggaacattccggtttttaattttgagatcttcagcgcgggagctaacgacctgcgaggagcgcctgcgcgcaagaagagacatcggattcaggagatggagcatcgccttgccagacttatgatgtgtctgttctacagacacatcccgatccccagtgcgccggacggtcgtgctaccctccatcttgaaatccctctgtgtcattgtttgtttatccgccggcgaagcgtccggcgaggttctgaaccgaaaatggcccgacgccgttggcgcagtcggcgatcgtttctgcttgccgaatgaacgtcggaagggcgagcttgatttggaattcggctctgcgtctccttgatcggaccgtagacccgtcacagacagttgtgaattattcgactgggctgtaaattgttcttcctcggcgttatcaggactggaatgaggacgacactctttttcaaatgccggcgatggaagagcaagagtaatggaggaggatatcggcgcgacggatgagctgatgttcagcttggaggtatctatgtccagcggcgcctcgttcgaagaggggccatcgggtgaggggtgaccgtcgagggcagtggtgagcgtcggtgtatccggaatctgtggaagttggggagggcttttaatggggcttccattcgctcccttgacaggtgagggcgcggggatcgaagcaggcgacgcggacgaacgtcgatggtctcggcgccagtacgaaaagacagtagatggcggcatggcagttccttgaggccctcacgacgccaggttgagtcgcgcgtatgctcaagcggcgtaatagtccattacagttatcaactgcatatgctaggtgaacaaatacgctgtcatatacagacaactggaccgtggggagatgcaaaacccacccgtgggattccaaggttcgtaaccctcaagcttttgtaagcctattaaactcgattgcacgcaaagaaggggtaatccatagcaaattgcagtaaacatctcgatttttacgtttatttatacaaaagacaaagatcaaagtaacgcgcggctaaaagtgaggttacacccatcctgctgcagtgtctgggcctttctacaatatcgcgtcacattcttgcccctactgtcgtcttcaatgttgactttttgctgagctgggcgcatatggttaaattccccgaaatgtatgcagttattcccctgtaaatcgtacagctaggctccgtagatatccttcgagaaaaataaataaataaaagaatgacacgctcaaacagccatatgctatgctaacggacaaaacataaagcaaaaattaagtgataacgctttcaacgaatgctttgcctccagcgatcgatcacctcagtcttgaccgggccagggggtaccatgtttggagcataccccacgccattcatgcccatcatcgcagggttaataggatacccatattgttgtgccatcgggtatcctacaggtggcggatatcgcatttgtgtcggaaactgttgcatggacatgcgattcccaaactgggacatggtgacaggccgctgattgaaaacatcatacgacgactgacgagaaaggtgggagggacgaccctgtgtaagcgcagccatgctccggcgcattcgcgggttctttggagccgctggagcagcagcggcctcttttctaaggcgactgcgtcgttgtgcgagtgtctcttcctcgatgggaacggggacttcttcgggctctttaggcgcaactccagcccgggtgtcaatttcggccatcaagtcgctggcgaacttactctccgagcgtttatgtcccttcaaccgttgaactcgctcggcgagggtctctacctctgtttcatcctcgctctcggcggccggctcagggacatgcgccgggggctctgcatacattgtaacaggacgttgctccggccgcgggattggttcaccccgcaacctggcacggcgtgaactcagaggctcattttcttcttggtgccgcatcgctagcagccccaaaggtcgatcttcttcgatgttggttttctcggggtacagcatagccaggggaacatcatcgtcatcatcccgtccttcccaggccaaagcgacaggacgttgccgccggttatcactttgcttttgaaccatatcgtccatttctaataaagtggaccgcataccacggaaaggcaccggcacaattgtccgccgtcgatgcttcaactcatgtttccgcaattccaattcggcgatgagcgtattcggtggaccaacataatccataatatccgcgtcgtcagacccctcgtcttcagattcctcactttcgccatcagtgccttccggcccacgctcatggccgtgctcatcatcatttctatctgagtcgtccgagccatgtcgcaaagtggcggggacctcatcttcttctacattattagtgttataagactggccaaagatggcccgcgaaagacggtttgtcttgtgcactgtcgggtcttttgtcagggtcttgcgttttgacgtgttgtagatgaacgcgccgacttgaccagcatatgggtgatcggtgaaagccgaaacgggtgcattcgcagaggcgtccaaaatactctccagcgtagcaaccgcggactgttgtttgacctcgacctggagtgatgtactcggctgatcaaaaaatacactggcacggagatgtggtggcactgtcgatttacgtttatcgttatggctatcgcgtgagtctcctaggacggcgtcgggtagcccaacagttgactttctatcctgagcggcgatggcgcctgcgatttgtgtacgacgcttatcccggtcgatattttccctgcgtgacaacttcggtgggagattcaacatgcgtgggacaggcgcgggataaaacaccatattctcccctgctcgcgggttcttgtaatggtccgggttgcgggcgagcggcggctgctccagagaaacctggcgacctggttccaagggtgtgaaatggacgccatcaaagtcggtgaacagtgtccgcgcctgctggtaggtatcgaatgatgcgaccgaggcccggcgctgcaactccggctctgcgggaactccttgtgggacatattggtcgtaatagtaatcgctctgggtattgaagaggggctgtgccggtgggagatcagggagcccagggaattcatccacttcaggctcctcttcatgtgcaggctccgcaagctgagctagacgcgcccccgatacggagcgctgacgcccgggcgacgcaattgatccatgggcggaggaaattgtggctaccggggagaatgcaccagtccggtggattgaattggacgcggaactgactgagcggcgcttttgctcttgatccatgcgacggatctcgctctcaatgtccgcggaggacgagctcagctgctccgcgctttgctccaaccgcgtgacatttcctttgtaggctccttgtatcgactgcaaatccggggtagggtggctgagaggtacgggaacctcactgcatgcgctgtgaatggggcgctccggagaaggatttcgcgcggtcgtattgagtggtgggatacggaggctgttggctcgctcctcgggggaaggatcggcgtcatagtcatcatcttctactacatcgtagctggcagcagtcatggagcggatcatcgaacctaatcgactgaaagtcgggttctctgtagttttggcagtttctagatggcttccgcccccgatatgatcagtatcgagcggcagctgctcaaaggcatgtttgtgagtgggcgagggacagggcgaagcggaagcggaagagacagaagccacctcgtggtcgagctgagcgatggcgttgtacgccataatataggtcttagtcaccgactacccatccattcagatcgattcaaattaaagaagatttcaggatcaaaggaactcggaataccagggataccagacaaagaaacgaagccagaagagatgtagggaaagaaacgaaaaaccaggaaattgggctgggggatagcggctaattttggaagtttgctgtcgtacaataatttgccctggaatgccaactgagctagtaactccatgctaataatatatcgatgcaatttcctcctaaaagtcccccaaaagcaaggaatccaaagccactaaggggcctctgcgtccgtgtcttagaccagtcaacacgttctgcgcgccgagtcaggcggattcgactctccactctgctctagaggtcttggcgtttccctatatctatataaggagtccggaatactcggtataagaagtataaggagtgtctcaggcaaccccttaaccccccgccattcctctacttcgctgcctttctacaggcttcccgggaacatgcatcaaaaggaaacccaaagaggcaatcccgaggtgtatctgcatctgagctagaggacttgacaaccccggaccaatcagaccatcaacagatatcgcggcctcaacttttttccatgagttaaattgcgagttaaattgctttcgaggtttaccttgctaggtctgaccagtgagaatacatcgattagggttggagactcgggtcgcgtgacctgtcaagttcaatggctccaatccaactggcaccggtcacgtgctgatagcattatcttatcgcatacctacctcatacatcgtctatcctgtcctctttcctatcaccttgtcaatcacttatgagatctgcatcttttccaatcaactactcatcatgccaagcagggacaggagcagatggcgcaatgtccatttctacaacgcgtccaacgacctcctaggaggtttctaccaagctggttccataaccgacgctaacctgatctggattctccggagcgtgttgctagttcaggcggagaatctcacgataaagcatcgggcctccgatcgaattatcacaccatcaaataactccgttgtccctggcgactatgtcatttcctgtgatggtaagacttcacgtatcactagcatacggttataattaccaccgttcgactaggaactatcagggtaacggacgaaccgtggtttgctcgcgtgatcagcttttctgaatcgggtcgagaagattcatttcgtactgaggtccgccagcgagacgggagatgtgttatttccggcgatatcaaccttcttgagccttgggatatatgggatggtctacaagctgcccatgtattccccctggaaaaggagaatctatggactcagtataacttcgggcgttggatcacgaatatggaccatacgacaggagtttcgaagattaactctgttcaaaacggtttacttatgggtgcgacactacacggttgtttttatcagtatatgttctctatcaaccctgatgtacgtttcctaatgaccaaatccctacgcagaataagagacaggacagatataagattgtcacatttgcaccagattcctacagaatcaatggaaaagtccttgacccgatctgccggaatccaaacgacctaaaccatgtcgcggacgagctcctaagatggcactttcggcaaagcgtgctcgctaatatgaggggggccggggagccgatattcgagtcggacttcccccctgggacagatcaaatagcgacgttacgagacgaaccatacggcaaggagaggttgggaatggagtttgaactcagactcggacctagagccaaagaagaagaagagtcgacatattaatagggacatcaacaactactagactcgaccgtgatgtagcttggttaagcgcaatgaggaggtttttgtatcactaccctgaaatagtgctaattcagcatattattagtgctttcttcaagtcccactaggtgagggttcgacgataatgttgtaacttgtggtctactactcctagtgaacgactttgctttcgccctgtttgtaggcaggccgtgtcggtacccctgctgcatccgttgcagcataaattactctttcttcttttttgcaaagatcaagaagttctcgcttccctgttcttctggtgggggcagtagaatgtggagaattgaaatatggtacgagctcttgatacccaaaggatagaatatacatattctaggacagcgtgttcatcccggctgtctgccaagcaatctcgtgttttcatcctcaattcgccgtttgtttcgccgatcgcccatgtggctcgtatacatgtggctcgtatagctcgaggccaaggtgaagaaacgggactatttttggtaacatatctggatctttcagacctcacgtcgtattcgccccggacttttcatacagaccatcgttttagccccagagtacggttgatattcagcatcttcatcgtattacgagaaaatgaaacgaagaaggcctaattttaacaaattctccgcggcgctcagttccacgttgatcagcacctggtaaagatccacgcatcagtcaaggtataagtatcctagcccggcctgatgcacaatattctggttacaaattcaaagacattcaaagtttcatcgtctctcgtatcaattcaaagctctatcctcgaacgcatcattgaaaggaaacgaagtcctcagaaaaacacgcaggatttgcctactttcctaactcgccattatgcgattcacaaacttggctctgaccctagctgcggctttctctgttgccaatgcgtacgccatcactgccagtgttgccaactgccgtactggtccctcgacgagcaatgcagttgtcacgacatacaaaaaaggtgccgatgtcaagatcacatgccagacttatggcgaaaacattcagggaaactctatctgggacaagacatctgacggctgctacgttgccgactactatgtgaagaccggctcaaacagcatggtcaccaaggactgtaacggtggcagctctggcaccggcagctcttcctacaagggcaagatcagtcgcaaggagatcatttcccgcggtcagttctgggtctcccgccacatcccatactccatgaacgccgaatacccggacccccaaggccgcaaataccgcacagactgctcgggcttcgtcagcatggctttccatgcgtatgcgccaggatataacaccgtgagcctcccggatattgccaagtccatctcgtggagcgacctccggcctggtgactttgttggaaccctaggcgctggtactggcggtgctgctggccatgtcactctgttcacttcgtgggccgacagttccaagaaggagtacaatacgcttgagtgccgcggtacgtacggctgcgttgcgtacaggcgccctgttggttggaaggttggaagtttcacggccaagccctacaggtacatccacgttgtggactaagctggagcttgtagcattttggggttgaacggtgatgtaaccaattttggtgcgtgtataagtgcttgcgacggctgcggtggttgggtaagcggagggatatgaatagcttcagatgaatttgtgagcagatcagctaggcagaaaacgaagaaaagatgaagttgatatactcctgtctgttactatcttaaaggatcggttggtagtacttgctgttcttgcctaggaaggagaactttccttcctaccgcgtaggcgagcgtaagcgagtaaatcctatttgcatggtttgatcgaagacgcacaaatgggtttccatttttcctctcttcgtcctttttattctcactttttgttccgatataacctggccaataacactgtatggcaggacaatgctaccgtagaatctggacaggtccagacaaaaagttgttaggaacgtactcttcaaagcaatgatgatgattctttaatcaaatctatgtgtcctcggctacgaagatttacacccctcatgtattccgtgggacttgtcaaatggcaatgagagccacgacttcaggaacgtccacgggaacgcccggtttgatatctgatgcagacctacttggacctcataacaatggtaatgttatgatccctgtggtaggtgaagcagcatgtgctacgggtccctctgcctacactgtctcgtgggctacggtgagatggtggtcagagagatggggaggagagaagaagaagagaagaaaaatggggggaagggtccttttatacccccaacccacgtgccttcctaacgtgtgccaggtccctcgtacattccctgtcaatgtcaatgtcacatgcattgtgccttatttatttgccttctttgtttacacgcggtccttcgcgaggcattaccgtttcccaacttgaatttctacttccagtgctctgattgtcgtacttgatctttatttcatccacataacttgacccgtagctttcatagcttgaatgaaccagaaatcttccaatcatctcccaaatcggttcctgtcttctatggaggtacaacgcccggataaagatatatgtctatggctcgattatagtaatggtctatcagctctttctggggtacttcttcacgtgctatccttgagcatataggagaagacaatccttttcataagcgcttcatctccattgctagcagttttacttcggatactccaagacaacctttcgagtcttgatgtggatcaagacctcagggatctagtatgcaaaatgacaaacctagatctcaagaaaaggatcaccgcaatgcaggcacttcagcaccgctggttcaggtcgatttaagaaaactcgcagtataacctgggataagattgtgttcaattcttcaacattcggaactatatatggcaaatttcctaattctggtgtgctagtgacacgaaagtactccgtaccaaaaacaacaactgttgaaacacgctaatcgggttgcagcaatacaatttgtttcaaatcgtcacaatgttgtccatcctgatgctaacgacgcctggtctgtagtatctgcaggggactctgcactaaggcaaacatgggcagaggtagaggtgccatcagtttagcacccggcggaagtgccaagggtcgtcgggaaatattatgccggtttcgctggaaattgactgcaattacgctttattctttaagatagcttaacattcacattctcatccggggcactgaggcatacttcgagcaagcattccacgacagggcgcatatcctctttgctccttggcgagataaagagccaggggtatcgatcatgagatgtccgctatatctgtgatctgaatttagcagctgctgcagctgctttctctaatggcgatgtttacggcataaagggaaaatctaaaggtggtatttcgcgcagtctgaggctcttctaagaaaccgccgagtcctgtggaatattcgggttgaaggcacggtttgaacaacgtagtcaatttatgagaagtgagggggattgaagcgaaagtcgggcagtcatacatgattgtatcacatgactaaaacgggtgcacgctcactgccacaccgagacttcatcgaatagagactcattttagactcatttatagttaggcatggaaagtgagtgctacggtggcgggctaagacaacacggctacagtgccaacaatgattttcactcaacgataaatcgcacaagtcaggtacattttatggtatactaataccattggccagatcattcatttataggctgcagcctcaaaagatatataaaagacttgtactctagtcgtatacaggaaatagcaaaattagaggtggcggtgacacactagcagttaaagaccgcagagccttaactcttgaccaacggtactccaggatggggccggcctaacatccgccaattaggcggcgtctacataaaaacccaatatctgtttccttggaatctatccatttccccggtaaagttatcatagggggtttggtggatcgacggtgacgaaagagtggagcttggggggttggaatcaagctttgacatcttgaagggtttaaaaaccattgggacatcttggactgatagaattgtacattcttttctccatattccctcagcaaggtgcttttttttattgttattgttgtgatgggaaactcgagggaacctggccgggatggcggagtcaagggtatgatacaggtttgaagggattgctgcgagatagcaataatgctgatacaacgacagatgctgtggatgctcccgaatatgagcaaccagaaggcaccgaagaagaagcaagcaagaatgaaggcatgggcaaaaacccatcatatagtttggctggctctggcgcacagaatccaaacaacaaccaaggatatacagatgaagagtaccagaagtacgcttctcaatataacaaacaagatgatggcccgacctggagcttggctcatccactgccccatatagtccggcccggcatgcgtcacggcgccttgccagaggaccgaaaagaggatcgaaaagaggatagagacggcacgacagagaaccagcaggattcagcgcacgaggaggaagttcgcaaacagcagtcgtcagaaaatcgaacgaagaaggtcaacgaccccaaagaagacggctttttcaatacatggtcgaaaattcgccaccaacttcgtgagccgctggccgaatggctcggagtaagttttatcgatatggctcaaaaatacaatcaatcaagcagtctgctaacaagtgtctcgcacagacaactatggcaatgacaattggtctttgcgcgaccttatcaaacttcacttcctccggacaagccggatcataccctgcccaaagtctcgcctggggctttggattcatggtcgctatctacaccaccggaggtatgtctggtggtcatttaaacccagccatctcaatctcgctgtctgtattccgtggattccccgcgcggcgatgcgtgatctacattgccgcgcaactcctcggagctatcaccgcagggggaatatcatacgcgatctaccatgacgccattgttgaagtcgccagattggcgaacgtgcctcagaatgcaagtgtcgcctcgcaggctctcctcacgttaccgaaaccatttgtccgtcctgcgactgcattcttcaccgagtttgtcggcagcgcaatattacttggctcgattctagctctgggggatgacactaatgcgcccccgggagcaggaatgcaggcatttattattgggatcattatctcgattgtgatccttgcacttgggtataataccggagggtatgtgtcctatttctaaactcccgattctaagtgctttcgaagataactaatgatctgatagttgtttcaatggcgcacgagactttggcccacggcttgttgccctcatggctggatggggtggcaatatcttccgagaataccatgcatggtgggtttggggaccatggatcgcagacatcaccggtggattgtttggcgcattgatctatgatatggctatctttaccggtggtgagagtccagtcaactatcccccgcggagacgaaagcgggcataccgtgtgagagccttgaattttcggaagaagcttcgtattgggagaaaaaagctgcccgatcttgaacgttctgttgcagctactgagcaatgagctatgttcttctatctatgcataattattaattagtatagttactggttatagatttaaaagtgaaattactgggcctaagaatcttaggttgcttcatgtacatatattacagaataattgaggatatagctattcttcactcgctcttctctctgcaaccgccgtctccaaaccagctgttacctcgtacgcagcccttgggactggccggcaaatatgaccggaacaggccaggctggagttggccaagcggagtgcgtgaaggaacctaggcacgtgatatataccacagaagataaagcagtgttagaatttcaatagtcttcattgattcactgtccctcattgtgtcttttacaatgtctccaagagtattttatggagtctcgggactttccggtctacacagtcatctcggaagatcccgaatgtagatgtccctgcgatagcgattatttgaatcatgcggggtcgagcttgagaatataagaaatccctttttctgaattgcttcttaggttctgcaacacaatatcattttgcctcgatatttatttccctttattttgctttgattgtctcaaagtaaccatgactatcggaagaaagccgcgcgttgtttccctcggggagcctgcattcgtgggcagtgaatatcttactcaattcaagaccgaatttgactattccgtcctccctgcaacaaatcgcgaggaagcccaggtattgctacccaaagacatcaacgaaaatggaccgatagacgcgttcatcgttcgcatgggtacgccaccctacgagccactcgatcaggatttttttcgagcactagcaccggggtgtaagattatcacttctgctagtgccggatacaacgagttcgacgtggactggatgacaaaccaggaaattgtgttttgtaatactgtgaatgccgtcgctgaggctacagcagacatggctatatttctgatacttgctgttctgaggaacactacaaacgccgagcggagtgcacggagcgggatgtggaggaagggcgcaaacctggttcctacttgtgatccgtcgggattgacacttggtattgtcggtatgggtgctattggaaaggtgaatagtccgaagtccattgactcggagcgctgctgacttccttctcagtacctcgccaagaaagccgcggtcttcaatatgaagatcaagtactacaatcgacaccaactaccggcctccgaagaagcagcgtacggtgcaacatattgccagtctctacatgagcttctgcgcgaatcagatgtcgtctccttgaattgccctctgaatgcggcaaccacgaatctaatcagcgaagccgaattctccgctatgaaagacggtgtattcctcattaacacggctagaggagcagtcatcgacgaaaaggctctcattgcggcacttgagtcaggcaaggtacagcgggctggacttgatgtttttgtgaacgagccgagtccgaatccctactttttacaaagtgataaaatcgttgtgcagccacatttgggtggtttgactgagaaggcattccaaaaagccgagagagaatgctttgagaacatccgtgcttttttcaagactgggaaggcaaactcgccagtgaatatcaaagtccaaaccccctgagggtgatagactggttcagtgagagatatcagctcagttcagtgcttagctagtagtaactctaaacaggaatataagattattatctactcagccctccttatccgaaacaaagtgtcaatctatagaaatagctctccttcgctatcgttcattggacttcggattctcccggtatgttatcaggggcggtttctcccgattcgcatttgagaatattcgatctgaccacagattgggttagacttagtttcgcattgcttaaagtgcgcgcaagtcgatccttatgtgggaaatgtggggaatgcctggcaacatccgtactccgtaattgtaagtacgcgacaatgaggataggggcgaactctgatagaccgtcaataatgcagttatggacttcaaggtgtgaaagaatgattgaggggtaaatgttagatcaagtcattggtcacgttatctcaaccgttttatctcccccgcgatattgtcaaatcaacattgtgtctcattccagcattttgaatcatgagacacgcaccaaagcgaccaagagtcgggaagcggacgatactggcttgtatcgaatgcaagcgcaagaaactaaaggtcagggtcgcccgaagagtgaaagagatacgtaggctgacagatgattagtgcaatgggcaaacgccgaaatgtaaccattgcctgaaaaatcaacatggtacgtcaattactcttttgggttggtggctttatctgatgtggcgcagaatgcctcgtggaagaccctgccacagggctgcgtcgcccgcgtgactacatgcagtcgcttgaatcgcgtgtagtttatctggaagcgcttctccgagaatcacgtccagatatacctttgaatggagataatcagcatgagctcagggatatcgagtctaatactccgtttgttccaacaacctcggcccaggcaccggaagctccaacctccagccaattacaggactcgccgggggcatacacgagtccttcctatatgcaagaagcatcatcatcatcatcaattccaaaagagcacgccgggcaggtcgaccatctctcttcggaagttgccctactgtgtctcaatgctgcgggtggtgagccccactatttcggtccttcatcggcggtcttattctcgaggatcattagtgcaacaatgggtctcaaaagcgagaaatcgtcatcgtcgccgcgtacttttgaaggctcggaaagaagccatcctaatgcacggcctgatagagtaccaggactaccatcaccaagtgttgcggctaatctatcgcgggcttatttcgataatattcaccctcagtatccttttctccaccgaccaacattctgcaaatgggagctggatgtttgcaaatctagccagtcggtacacaatcctgccgccggagaggttccactatttttcgtccttatggtatggccacctccagtggatttaagatatgatctgacgatattgacttatcacaaaggtctatgcaacaggctcccttgtattgaatcaaagtcagcacggtgccgcagcggtatgttctacttgaccacttgcgtattcttgattgctaacgctatcagatgtactattccatggccttggattacctcccctcagtccttgcacttaataatctggaatcaatccaaagcatactatgttgcgctgtgtactcaatcagatcacctactggggccagtctttggtattttcttcccctatccttgttccaactcaaactataacgtcagtaataggaaaatatcaggcatggccattcgtcactgtattgagctaggataccacagaagcgcagaaagatatcgcaaacatgttgatcccttgacaaaggaaatgtctagaaggtgcttttgggtcgcatacgacattgatcgtgttgcagcttttaccctcggtcggccaatgggtatcccggatgagttgatcgatgcagaggtatgatataatctgtctaataccttacttcgatcttttaacctcctataatagcttcctatggatattgaagacgagaatattactcccagtggcctgttggcgaacccccgtgctaccggtaaccaggtgccaacaatcatgacaggcactcttcatgttatcaagttgaggaaactatgggcaaaattccatgccactctctattcacctcaattacaatacgccagtacgggtagccaatttgccactgttgacactctgcgccaagaattggaagaatggcatgcatcagctcccacacacctggactattcatcctctcatcctttatcggtgtttgcatcaaatgaatggttccaaattgcctacaatcattcaattctgattctttatcgctcacatatcactagaattctgggtgaacgacagggatctggcccaaacgagtcgaacagcaccgacttcattgaagaggaagaggacctccaaagagcattcgaaaattgctcccgctgtgctcgtgaaatatgcgtgctgtatcgtcggctataccagaaatcaagtgttcaattcacttggggaagtctccatattctgttccttggcgggttgacatatttgtattgtctctggcggtcatggcgaatacgccagcagactaagcagagcgagatattaaagacatgtatggcctgcacaacagtcttggtcattatagctgagcggtggaacttggccacatcgtatcgcgatatcttcgaaacactctctgagaaaaccatcaacatgatctgcggaaatgataagcttgctggaccagcccctccacagtcacaatggactgccccttatgacaatctcctttccccaagagactggagtttgggctttgatgatttatccatgcctcaaggttccgactggtttattcaagagtttttacaacagttcccagaatcttaacctgatgaaaccgaactaagagtcgaattgcatgtactcctccaggatttaaaggccgctcagttatactcagtgaatgaaaggcggcaaggtgtgggcaaagctctcgtgcggcctaaaatatattttgaacgtacgaggtcgtctagtatgctatgaccatcgatacacgtcatagaaatcgttcgaattagtttagtagtgtggactaccatagttctgcgatccaaattaagcggcggctagctagggtctagggtagggacttataaattcttccgttgaaacctttcctttctttctcctcaaattctatcttctttctgatactaaagcttaccatacaagaatcgttcaatcgtcactaaaatgtctgagctatctgttgaaggccaagagtcgaaggcagtcccctgctaccacgaccaccctccgcaatacgactcatactatggaagccaagacttactcacctctatcattgagaacgagcatactgtccggaaattagccaaacggatggatgagttgaacacaaagataacggagatagccaacataagagaggagctggagaagaaaacattcctggaaactccagcttcgaatcttaccactgctgaagattttgaggagttaagcggggcattcacagagatagcacagataatgaccgggctgtcaaatgcttgcaaagagcgcgccgttcacaacaccgatctctataaggccatcggaaatctcaccgataacgagctcgagcggacttatgattctttaaagcgagacccagaccggcagatccgacatgagctggctcaggaccacaaagaccgcagcgacagagattcaggacacaatttacaatgctcttcgacgaccaatccagtagagcgagctggcaattgcacatacaactcttgcagccggttcgccgagcccttagcaacgatggacaatatcaatgagaaacttccatccgatacggccaatatctcgaaagtggccgatgatactaccgcaaagtcacccgtgagtttttggaagaaatttttcagacgttcagctcggccttaatagtgaagtggaatgagggtttctgaaaggatcagattatgagatgactgatggatcttggtctttatcttgtctggtaccaacttgaacgattcatgcggatgtatatactgccgatgattaggttgtttctgtatggctgaatcaaatttgttctacaacctttcacacatcttgagatacggtcgaaatgtctaatactcaagacttggacaaacattttcttttcctagcttatcatgatcacaaatcaatgaggtctaaaagaatctagctcccgcggacaaagagcctacagtgagcagtgaaatatatgtccgagagaaaagtcaaggtaccctaaggcaccgacggttgaatggtatatatttcataatcacgtccgaagagggcttgtggaatccaaaaccaacagtcaaacacaggaaaaataaaacaacaaagaaaagacaacaatcaaacagtagacctccacctcacatctacacccagtttttcctttcatctcacctcactgaggttcccggagagaagcaaaaacagtcaaaaagccccagaggaatgccgcgaaagcacccttgatcgtacatccgttttcattcatctcacctcgctgaggttctcgaagagaagaaatcggacaaaacaacagaggaacgccgtcggtaccataacccctcatgcgggggcctcgccgagctgcttcaaaccatgggcaatggtgcgcccaacactggccaatgagttgctcgtggcggcgggatctttcagccttataacaagattgcccatgaacgaggggctctttggtgagggagccgagccaggcgttgcgggctttctgggggtcgcgggcccaggcgtcacgggggccactggggtcccgttagctgcaggcagggccaggtcggtatcgtcgggatgtcctcggccgcgcgggccggattcagattttggaggctatgccgcgagatgtcagccgatgtacgaagaagcccccggaggtgtttcaagaatcgagagctgccatgagagctcgcacgagagcttgcacgagagcgaacaggacatgttctacagggatcatggtcttnnnnnnnnnnnnnnnnnnnnnnnnnnnnnnnnnnnnnnnnnnnnnnnnnnnnnnnnnnnnnnnnnnnnnnnnnnnnnnnnnnnnnnnnnnnnnnnnnnnnnnnnnnnnnnnnnnnnnnnnnnnnnnnnnnnnnnnnnnnnnnnnnnngcgaggggacgacagatgtcacacgcaggaaagtggtggttatcatgatggtttcagtgattacctccatgatgagaattttgttgagaggaaaaacatcgagggcacgggaggaacatgatgtactctcgactaaatggttcgtgcctgccgaatttgtagtttcccattgcacgagcacagcttagtctctatctctctccctcaaagttaagaaagaagattgctgaatctgatgtagttgtgttggaccgttgcacacactgccacttcgttcggcatggtaataagcccacttgctttgacgatgtgtctgatgtgtgtagagtgatgatgtccattgtgatggtgtgtgtgagaggaagagaagagaggaagagggaaagagggaaaagccaataaattgtctgcgtagcttcccatgattagagtagttactcagaggatagtaaaatcggataaggatcgagtttaggtcaggccctaaaagaggagtctcgaatatagtgcttgcaaacacttacagcttcgtataatgctctgggagacaccataggcattcgaagctccgagaaggattgtgctccccgccagtagctgctattatagtgatggttaagatcggggtggtagcctatctcccggagaaataagcggtagtaaggagagacatataagcatgatacttaaaaccttggcaaattctactgtctaataatagggaatggttgggtaggccgtgggccgtggcaaaaagcaaggaggaggagtggcataatatacttgatactagatttatggcttatatactatcttttcaggtatctttttagatgtctttttaggtatctctaaagaacccttcagcccgatactattattttttcgcttttaaattcgtactttccacctctttggtacaccatctcacacgcgcaaagatcctctaatatacatcttcggccgcatcttttcctacaataggatcaagatacctgtaccccttgactagaaacttgcgatatagtctttgcttaattaagcataaccaacttatttttaacgccgagactccaaagtcacgtcataggtggtagaatagtgagtcgctatagcatttatactccattctttctagtagattatactacctagggcctatagttcccacgtgactgcatcgagatccccgataaggtcacgtatatcactgtataatcttacacccgacttgtgatcaaggcggtacgtttacgattaaggcgatcaccgttccccgagcaaataaggttatttcaacccgccgtatatcagacaaataacaaccaagcatttttccaccgagacaatccatatactcttccctgttgctaattgatgtcttggcaatttccgactctccaaaaacgggaccattcctgcttacgcgctaatctgctcaaaccaacgcaaggctgtggccaggtcattccagcatttgcccatgtatataaaagacaagatcacccattctagaaaatagatagttactagaggggctgtatatactccggattcctgattgcgaaaccacaaacgacatgtccggtatgacccccacagttccacttccagcatatagtctccatattaacagattgtgtattcagaacctcaagataaacccgcccctctccgcgtgggcgtagtgctgttcccaggcttccaagccctggacgtattcggcccagtggactgcatcaacgtcctctcctggagccacagcgtgacattggcacttctctcctcaaccctggagccagtgacaacaaagtcaccgttatccgccaacgctgtaagccaaagcgtcgtgccgacccacacgttcgcaacagcaccgtctctggatctgcttctcgtccctggtggtctgggcgcgcgcggctcgagcccagaaatcgaggaagcaatctcgtatatccgaaacgtgtatccccagctacgctatcttattacggtgtgtactggctccgggcttgcggcgcgagctggggttctagatgggaaacgagccacgacgaataagagggcgtgggcggagatcacggggctggcggtggatgttgagtgggttcctcgggcgagatgggttgttgatggtaaggtttggtcttcctcgggggttagtgctggtattgatgttactcttgcttggattgaggaggtctatgggagtgaggtggcggggaagatcgcgaatagtatggaatatactcgacatgaggatcctagtcatgatccatttgctgaactgtatgggctttgagggaactatgtgcctacttttgtgttttgtgtggagggtctccactcagttggggaaatgtatacagaaatatatcttctatgctgagacggtgtggcgtgtgcgcagtgccacgtagcgacacgcaaaattgcattgaccattttttagtcttatgtgggctttctgtgatcctttcaagggtttcatgtaaatgtaaaagggcctgtggcataacacgaggctcgccgtagagtatgaagcacatataaggaggcgacgatttggaagtgcccatttcccagataagcaactcggcctttccccccccgattttctagtgaacattgaattctcatagcccttcaaagatcagtagttgcggatgccatggatccgtttctccaccgatttcccatttcgcgggcacgtgatcgcgcgccgttatcgacgcgcctcaatctcacaactttgcgatccgaacatgaatatcccgacgtgtcatcatgtcttactatgatattgactccatcttgacggatgcacaggtgagttagtcgcgacccgcaaaaatgaaccattactaacatcgacccagaaactaccatgtacatttgagctcgaagtacccggactgggtattctagagggcaacgcgggcgaagatgcgagtgctctatttttcactatccggcgacacagattactgaccgatgcacagatcaaagccggaacccggatcgaccttccactatggctaggtgaaatgctctcgatcgggtaaggttcttacctagaagaccagcgtggagtttgttcttatttttaacatggtatttatggctgcagagcgcgtctaggaacggcccgcttggttacgctcgacatgcccgaggcgctctcggagcgggtgatgaacgcactgaaggccgatccccgcacagttgacttgcgcgctttagcaccgcatttctacaaccttagcgagcggattcttgaactcttcgaggaggaagagatggtcgatgttctcagtgatgtaggtggcattatttccgcgactattggttgagctaggattaacaggctcttagacattcaaaaaacgagcggctgagattgccgaccatgcacgcaactcgcgtggtgcggttggtggcggagttgagttccttcgtggactggatgagactgagcgacaatgtaggttatgattgtccttatttggatgggggatggccgctaacagatatggttcaatagtgttccgggctgctcatgaccgggccaaggacatgcggatctggtcaggagaggcgaaacgtaagtaatagtgtttaatagcgagacatttctctgggctctgagctgtgctcgctcaggaaagtgatacattctatgatcgatcggataggtatatgacagagtatgaaggatatgagatggctgggtggagtcgcatagtttaatgttgagacgttgacttccgaaggcgacggagtggagccccgacccgtcgaaagggaaatgtttatttttgtatagccgacctctgggattgaaatattgtttctcctttgtttccgtataggatgattgatatatacacccaagacacacacatcctgccctctatcccaacaccaaatccaacattcaggagaaaccccgcgcaagggccaggtgagacgcgccccacggccccggtccgattggccgtcgacgggcgagagagacaccaccggagtgatcgtcgcgttaaggagccgattgactggaatctagcctcggggctggaaaaagagaaaaaactatttagaaatcaccagatggggatctgatgtttcttccattcctggcctctttccattcttcctctcataacaataacatctacaacatacacaaacattcaaatctagtgcggggccctttcctctctttggagatcgactcgtcacaactcgttggtcacttcaccctcgcgtttgactgatcccaagtcccgctcctcccttgagttggcagcctgagacccctctatgccttgatttgggtctattgcctcgataaacctaccttgcactccacaggttcgattccagcctctgattgctccccacctgcaactcatctgcatccctcgcatcgacggcctgcgtgttacccaccggcgtccaatcaccgtccatatccgagggtccatctattaatcctccgatgcgggtggtggattgtgcaggcaattgttactgtggtgtctcctgattgactaggatattgcacggctgcatccaaacaggggaacggggggcttgacggcacgtcaattatgcgcgttcgctaaaacagtatgccggcagtcattatggatgagaaaacccaaagaaggagctcggccgctggtcagcttgctccttcaaacactcgaagtcccgtatatcatcccagcactgcgcccaaacgcagtgtttcctctaaagaccactcctctagtacgtggcttctaaacttgcttgaattgagttccaacactcagccttaatttaatcggagctgacattgcttcttcttcaagacttatcagaccgtcctcaacatccatcgctttctcgcgtcaaaggtcgatcgaatatgtttactccaccaagaatgagtccagaggtctcatggctaggagaccaatcgcctgttcaacggggcgcaagaaccccagtccgctcatccacatccggtatgtctttcaattgccatcgaccttggctgtagagcacaactgatgattcgtggctagaaacccccgaacctagcacccctactctagtaaaccctgcctcggctctcctgcaggatctactgaaagaagaacgcgcgcaccgaagctcccgaggaaccatatcggaggactttaaagaaaatgctcctctcactccggagaacactcgaacccaggaagaacctacctccgagaaagcccgcaaagcaaacgatgtcttctccgctggccagagaaaaccaaaagagatgggcatgcgggaaatggaccaagtaagttcataagacgcaatccctgtgcactagctgactcgtctaagtatgtctccaaaatgaacaagctgaatttcgatttgaagctcgaggtcttccaccgcacacaacagttggctatgtacgagaaaaagctggaaagaatggcggagatggaagaacaactagcgcacatggatgatttgatggcggaggtggaggagctacgaaccaccgagaaagagaaccagaccctacgtgaatctaacgagcaactccgcaacgaccttgacaagcgagacctggcggtgactgaagccgtcgagctcatctgccagttggaatcgaaacttgacctgctggagaacggccggggctccaggctgtctatgtcgcgccccatgaccgccgatggctctgaggccttagctaaagcccaggccatgatcgagatcccggagagaacctcttccaagcgaaatgcaagtgtcttgaacgtagctcagaaccagtcatcttccgagctacgcagactctcgaaagcaccctccttcctacgagcagataacaaaagtactgccactttgcggagcctttatgctcctgaagaagaaacccagtcgcgctctgcaagaactgaactttcgaaatccgagagcttccacacaaacaacgagatgatggagccggaatcaccgagactgagcgtcctgagtgaatgcagcgagctgaatgcattcgacacgcctatgatgtggcaagaatttgatcagctggagatcccggtccggagaccgtcgtcggtcgcaggcagcttggatagctatgtcactccccgagagcgggaagaaagcagaaaagacaagattgaccggtggatgcagtcccgcgaagacgtaagcgagaccattatcaacagacgcaggaaccgagtatcatccgatgctaccaaggcgagcgttgccagtttctcaccagatctatacgcttctaaacctcgtggacgcggacgactggacggatctctcttcggaggcatccaccttcctcccacccccgacactatgagcacggcatatgctatcggtgcaaaccgatcgaatgggtccgatgggagtattgcagcccggaagggctcccagactgaggatttgttcttccctggcagacgacttaatcgcccacgttctgctggagagatggcctgtccctacagctatggcagtgacattgacgacagcatgcaaaacaactgcaatgatactccgcgcctaggagtcgctgatgagtctcgcactatcctgccctccttcaacacagtttcctccaaagccagcgcgctccttgggcccggaagccccgacaaccctgttattgaaacctttggggatttataccacgccagtgcaaacgaaggatccactcaaacaatcaaacgcgtccgtagccccgccaaagctaagaccccagagccgcacagtgacagcgactcttcaccaccactcacacctcaagactgggttgccgctgcaaagcatccccggtctcgcaggcccagaccgcgcgacacccgccacgaaatccaacccacagatctatcaccaggcactgtcatcagtccagcatttgaagacgacagcagcctcgcttcaggttcaagcgagctcgaaatcaccggtatcccaactctagatatgagcactctggatatactagcgcgaaacctcgaacccacccagccaggccccaaagtcgaagccaagcacgagcatcgtcgacgtctcagcttcctacccccattcttcaaccgctcgagctccaacgcccgccaactccaaggctccccagtcttaaacgacttcgaagacgacttcgacgacggcgctccatccccagtaatccccaaaaccaggacaacaggcggcgcgccccgaagaccagcatcccaaataatcaccgctccaaccgagctatacccctccaaccccccaatccacatcgaagaaccgcccgcggccttcagacgcggattcccgcaatcagcaacaatgtccacactagcggaccacggcaccgaaaccctcgcgcgcccctcctcatcccaaggcccggaacacaagcgacgcagctcgctaggaatattcggctggatgaagagcaaacgctctgattccgggcccgggacggagaaattcacggactccacgtccaaagagaaccgggcttcctcgcggctagcttacgaaacgactcatggacttggaattcctcatggaaacacggactccatggagactcatgtcagacaccactccgagatgggtattcagtatgatgactatgcgagacggcctcgttatatgggccgtcgtacacgcaggggctgagtctctctcgaagctgtcatcacggccttactcttcgttctttattttcttacttcgtctctttgcctcggtctctctttgtctctgttttgcttcttcttccatttgtacttcatgatacccggccctgtataaacagtagcgtggctacattcctttgcatttcttttactcttcatttgaaacgccatggtgtattatgagatctctttgctttatcttatgttgttactttaacgtatatgaatcacgactatagccttcttcatctttcacgatttattcatcctgtcggcagggtctactgagatgtgttttatagtctcaccttactctacgtaatgatagttcgaaatgaacgaagattcaagaagtcaagtaataattcaatttcctttctcgtcacacgaggacaactagttgatacgaagtgacgggcgcaagctccggcctccatcacttcgtatcaactagttgcccgcgcagactcgaacgcccgcccccacgggtctccccaattctcttccttctcatcgctagacgatgggagcctaaggcccccggcccttcacaccgggcgcgacaacaagggttccgtacacatcagggtttcccctctagtaagagatgggtattagcaagtgcaccgatagagatggaagcagggatatgagaagtgacttacgatgtgggtctgcgcgaggtgccgccgcagattggaggccatgagtcttggcctccccaccttgttgaattctgcgcagtacgggcactggtacgcgcagggagcgatgatctaacgaagtaaaatgaaacgtgttagtgatgaaggatgaaaaagaaaggaaggaaggaagtgaagtgagaatttaggaagggagggtataggcttggggtggatgggatgggatgggatgagataggatggatgggatggaatacgtaccagctccgcgttgttcagaggccactgcgcccgcgggccgtggcagtcgcagagcagcttggcggtctctctgatatgtgcgatattaattagcttggatcaaatgaaagcacgtagacaggtgacatggcgaagatggaacgaaacttacgcgaaggcgtcaggagggtggctgctgtcgcgcgccttccagcggctgccctgggtagggctggtgcttgcagcctgggctgcagcggcagcagtgcttgtgccctgggtagtgccagtaccctgggtggtggcagtggcctggtcagtgccagtagccgggacagtgctggcagcagggacagtgctggcagcaggagcagtgttggtgccctggtcagtgctggtggcggtgttagcagagtttaggagaagaacagggtcaataagctccataaagcgcctctgctcagagggatcgaggtcgtaccaagagccttggtgattaggcattgtggcagatgagttcagtacgtaattgagagatgtactgaaagtgatctggggagaggagagaagaagaggaaaggagagtaaggggaacaggggagtaataaatagagcaaaggcggggggatttcttgctctcacttgaattgccaggtagcaggagtgtcaatgggcaggagcgctcaataggcaggagcgacaatgggtgggtggtgtcattcaactgagcctaatacggaaggaggcaggcacaatatggctttggtgaatgaggcacttcaccatcaatagacctattaaggcttgaacttgacgagagttgatattgattgatattgatgcctaggacacattgtgaatagaatacttgaggcagaagagcagggtcctatacaaaatgtcaatatcaaattcagttaactccaaggcttccagtccattttgttgccaactccaggatttctcacttttccaagacgcccacacgattaacattaccattaagtcaaaataccccaaaacaaaagacctcactatctaattagtccagcttaaagcctaataccacctatgaccgtcctccccaagcgacttcttcttcggattcaatgaaacaatccgctgcccaggaagcgtatccgcagtgaaggccgcctcaaagatgctagcaatcccacgtttagcatagtgcgcgaaagaatcataatcatccgtcttcccattaatagccgcccactccagtccactaggcgtagtcccatccccaagatcactccaccgcgtaacaacaatacactgcttgaacctgcgatcatccagatcttcagtcaacttaacctcaatcaaatactcagtcggacactggggacatctccgcatcggccggcagaacccacacagcgtcgtcagcgcgttcggatcaaacgcctgccccgccatgcggtccttgacccggtgctcgagcccttgcaatccgcccgtactccgcggccgcggaatatgctccagcgcacacttacatgccggcatcagctcgccgtcgcgccagtgcgcgcacgcgctaaagtacggacagtagtcctcgcgcgagtgaagcagcatgcgctgcccggacgccgttaaacccggcgccgcgaaggtctggctggtgacgcggagtaagagcctgccggcgtggacgtggaagcgtgtgctgtgcgaccagttgtcgcgctgccagcggcggcccagcgattccggggccaggccgtagctgggaccgaagcggtgggcgcgcatgacgagctgcacgaatgtgaagggcaagttgcggccgtgcgtcatgcggtgacgaggtggggggttcaggacgtttgtggagtttgggcagtcgaagagcgggtttaggatgtgggttgggcggatgcgttcggttccttctttcgtgcgtctgtggtactttacacacgggatgcaaaggaggtggtgtgggacggagatgtccattccgacgaggaaattgatcttctcgatttggttgtctgggtgcgctagagccttgaggtatccggagcctagtcttcggtataatgtgatgctggccattgctaggcttgcggcttcggcgggattcaggtatcccgctatatgtgcccatagctttggtggcagacttgctatatcgccctcgcctggcggtcgacggtcattgtgctcgtatgttggagggtgaatctcgttgacgtcagatgttcctagcgtatggatgatttctgtgtagtcccgtcgctcacccagttggctgtccacttgcgcatgcaattccttgtatttaagtctatggagagccaatggagctaactctggcattggaggggcttcctcgacactggtctccacggccagccgtaggtctgtggaggatgatctgctgcccttgcggagggtttggcgggatttcttgggacgcaatgcgttggagaaaaacgacttgaagccattcttctggccagggctttctgccgacatcattgaggtgctaatagatgtaagtcttcgaggcctagatggagaatattagggtctgatgtttcggatgtctgcggtgatcttttccgcattacgcgatccgcccggtcccggtttaccgcattagttgacatcaggagaacaagaaatagtcaaacaagattcttatattatcaaatattgtatattgaaaacacatgctacaatacatatcaagcgcaagacatcatagcagcatttacaaatcaaatacagttatttaagcgaaacgcttctcgacctccttccagttgatgacgtcccagatggcggagaagtactcggccttgcggttctggtattggaggctagaaataattagtacggatattagatcattaaagaaggacctcttactagtaagcgtgctcccaagcgtcaataccgaggagaggctcccactggccgacgacggggtcctggttctgttaaggggttagtaactagaacaattcaagcgagaatcataacttacggcataggtgcggatggcgatacgtccggtcagcttgtcccgcacgagccaagcccagccactgccctggacgccagccagagcagcgttcatcttggactggaactcgccgaggccaccgtaggtggagtcaatggccttggccagagcaccagaggggggctcaccaccgccggcactcttgggggcaaggttcttccagaagagagagtggttgaggtggccaccaccgtggaagttgacggcgggcttgagagcgatctgagcattgatgtcacccttagccagggcggcctccagctgctcaacggcggtgttgtagccgttcacataggtcttgtggtggttattgtggtggagctccatgatcttgccggaaatggagggctcaagcgcgccatagtcgtcttgttttagtgttagttttagaaatttactctaagtatgtagatacagcttcttgaagctctaggtgatactgaagcaaccaacttacagggaagatcgggaagagtggccttgccacgggtaaaggtcaagcccgcagctccggccttgaaggtagccgaagctcccgagcgaagggcaacacgggccgagttgttaagaagagcagccattgtgaatgtatgtgaagattattatgtggtgaagataatgaggagggtgtcaattgtgaatggtgaatgaattcaaaagaaaagggttcgcggcggagctatgaagtacttaaccgactataacgtcatcttgttttcgtcggctcggagctatgttgttccgagccggatccccacgtgaatttcatgagctctggactgtgactgattgttcgtctaggacactacttgcttgatcttgcactttttgctgaaaaagaggggacagttgatttggccacaaactgccaatgaacccctaaaaagatggagtcgccttcgtcttctgggcagaagcgcaaggtcgctgacatgagctccgatgaagaaaccacgcgcccgaccgttggctttcgggggttcgccagagctgcctcgcgctctgtgacacctcctacaatgggtggactgggtagtggaccccgcaataaccgaaacaccatggccaaccctcgaggtggaggatcgtcacgaggtgggaaaggcatgggaggtggcggtggaggaggacccaacagcttcgccgcgcgcatgatggcaaagatgggatacagggaagggcaaggtctcggaactactggacagggtatcgtcaacccgattgaggtacaggcgcgaccccagggtgcaggcttgggcgcagtgagcgagaagtcgaaaaagactcgcgaagaagagcgccgagcagctgcacagaagggtgagattcttgaagacagctccgaggacgaacgacagcgacgaaaaaagaagaaggaggagcgcaaggcccagagtcggagcggcacaggtacaccgatccagcgtgcgaagcccaaattccgcacagcgcgcgaaatcgaagatgatatggaaggactggaagttccaaatgttctcaaatcactcgtcgatgccaccggaaaggagcagcgtgttctcacttcgactgctggcctgatgtccacgcaacaattcgtcagtcaagaggaaggagaagcgttaaagatcgccaagcgagctcgaaatgacctggaagcatttgcggatgaatggaaggggctgaaagagaggaaacaattcattgaactcgaagaagcccaggtcgtggacgaattggatgcatatcaatcccggatcgaccatctcacaggcctaatcgccgcagtggaagagctggacctctttgaacacgacgaaagtatcacggccaaatttgatgagatgacggataagcttgaggatttggaatccaaatatcgagatgctgttgatgagcagcgacttccagagaccgcagtcgccgctctacatccgttattccgccaggctatggaggaatgggagcctcttgaaaatcccacattcctcgtgtccaacctcactcgtcttcagcctcttctgtctcgcaccaacaagttagaagagccccggaaacgggcatccacttcaccttacgaaacgatgatttataccctctggctcccacgagtgcgctcggcacttctgaatgattgggacgtttacgacccgtccaaggcgaccgcgctggtcgtggcctggaaggcaattgtaccgccatttgtgtattcaaacgttctcgaccaattgatcattcccaaggtgggcctggccctcaaaaattggaaacctcgagctagccgacgacacgccggctccgaacaagatggaaagttcccctggtggcttttcacttggcttcaatacctggatgaacgacacaccaacccgaaacagcccactggtctcatgtctgacgcgaagaggaagttccgctcggtactcgacacatggagtctgcgcaagggtctggtcgatcgcgttgagatctggcgggatgccctaggatccgaattcgatgtatgcttacgcaaccacctgctgccacgtcttgcgcgtcatcttcgcgaggacttcaccgtgaatccgcaaaatcaagatctcacagcgctcaaggatgtcttgtgctggaagccattctttcagcctaatgtcatgggactattgctggtctctgatttcttcccgaagtggcacgagattctctacatctggctcaccaacaaccccaactacgaggaggtcggagcttggttctcttggtggcgcactcagatcccggaggagatcaacgagctcaccatcgtcgatgatgagtggaataagggcttgcaaactatggatcttgccttgcagctgggcgaccgtgccactgctgaactcccacgcccaaccacggcacagacgcttcctacccgggaagataaggtggcagcagctgcagcaactgccgcagcggctgctcctgaaccccgggttaaggcaccggtcgtggaagaagttgcattcaaggatatcctggagggctggtgtttggaggagggacttatcatgctacccctgcgtgaggctcatccgcaaaacggccagccgctgttccgtattacggctagtgctacgggcaagggtggagtcgtggcttttgtccaaggagatgtggtgtgggtgcagaataagaaggcgaaggagatctgggagccaatgggattggagaaccagctagtagagcgtgcggaggggcgatgaataccggcaccatactgtgcattaggtggattgacattgtaattgaaccaaatgtatctattcaagacatacaactttagccctaagtggggatgccatggtacattgcagagggtatgtaattcagtgttgtaaatacttattccaccagtattcaagtaggactgatctcgatgtcttccattatgtcatatgtgtgagtaggaagaaacaactatgttacatcgtgctattctaggattgaagatgtaacaatgctgtaatttactgtgcttcaacaatccacctaaaatttagacaggtcgctagtttctactagtgcaacctaccttgcacaaactgccaagcaattcagaaaaaaactgtgcaatgatgcttagctgacacgtagttgtcccgttgtggaagaaatagaagtccatagaaggccgtccactgttctgaaaagcgtaattccgctcggatttaaaagtctcggggtattcgggatctcggctaattggccaagatgacaaactccatggaatctcatccgaatcctcggagctaagtgtgcaagaggacctccccgcttaacggatatggagtactccttcctcctcattggtgcttgcagtccaggtgaatattaagacgggaaagccgcaatggttccacggtctagaataacatggtccgccaatgatactcctccaaatagactagtggagctatagatctccaacggaaatgcgggatcgccggttgcagccaatcacctcagggccaaaggtaatcaccgcatccttcaccaatggaatcggcgggatttgaacttgcctcgccgcctaagaggacaaaactgatgtcgtgcagatcccataccttcgtttggctgtcagcgctgacatttgaatgtcctgtgattggccctagacccctccttggcgaataaacctccattattttctgcttggcttgcattaactgtgggcttttgcttatttttttttttccatggcgcttgggttgagaccagtgagcgtccgtggcactgggatgttaaaaggggtgaggcgtggccgatcgttggagtggatttctttcttctcttcttcatactttgtcctatagtcattgttgatatccgtcaaagactaagacatcaattccggatccttctgctggaccaaataaagtgcaatcatttcccaactttgcctttctctctccatctctctcgccagcttgtaattgcgtggtggacttcctacaccgtaccttggagatatctagaagcatatcagtttcccggatcagcatcatggccttgctcttcatcaagcgaaagctattccccacaaaggatgcggacagaatacagtcaggttagtaaggaaagagcatacacccaaagagacatatacttacaggaattcaattcaggcaagcgcctcctcgcccgcattgagtccgacgataccatccgcgcagactctgagcaagacctcgagtcccaaaacggccgctcttacgacaccttcggacggtgcaacagcccagacgaatcagcaataacaaccaacagcaactgcagcacccgcgagcgcatcaacccacgtatcatctcagatgccatcctcggcctctctgacggtctgaccgtacccttcgccctgagcgcaggtctatccgcactcggaaacaccaaagtggttgtgcttggtggacttgccgagctggcagccggagccatctccatgggacttggtggatacgtcggcgcaaagagtgaagcgtaagtcatccacatctggcaaccaatcagcatatgtactaacaaatactagtgaatcatatcaaacaatcgtccgtgaaacacaagagttgatccaaacggactcggaagagacccgcgccatggtgcgcgagaccttctctccgtacgggctctcggactcggcagttgcggatatcacgcgcgacttgcatgcgtctcaagaccgcctgcttgaattcctgcttgctttccatcaccgagagatcgctcctgactgtaaccaggcgtggacttcggccatcacgctcgcgctgggttattttattggtgggttcattccgcttatcccgtacttcattgtctcgcagatcacgattgcactgtactggagtattggtgttatggcgattaccttgcttgtgtttggatatgtcaagacctgtgttgtgcgtggctggtctggccgcgctaatgtgtgggctgcgatctggggcggaatgcagatgtgttgcgtcggaggtgtcgctgctggtgctgcgatcggactggtccatctcattgatatgggtagcacttgatgacttggtggtgatggtactaatgatgttcacgttgcaattaagcgttcatgcattgcagcagtggggtttttgctttctctctactcctaatgtttctcattttttttagctcggcagcgggcgtttcggggacaaagctgcaaaaagctttatgatacacgtttaacgaaaaaataattcatttcccattgacaatctcaagttacatttcaactaccaaggcattactggccaccttagatagttatatagatatataaaacacaaaaccctataaacccaatcccaaatcacccactcaacgcaatcccaaccaacttcttccccttatccgacaactgaatcttcaaagcctcctccctcccacgctccgacatcttcccccaagtcttcctcaaaatgtccaccgtcttctcctcatccgcaagctccgtctcaaacttatcaaactgatcatccaaaaagaccaaacaagcaacatcctccagcgtctgcgtatccggatccccctgcttaagatccgccttgcgcaccagcgcgcccactctcgccgcctcctccgccgaatacccactctcaacacagatctgctcgaccagcgcagcctgtcgcctctgcagtcccgcgcgccacgaatggtacccgatctttgtggcggggtagctgtcgcgcggcacttcccagcgacgcaggtgttgggcgcggattgcgaggcgcaggagctctggggcggaggggttgagggttgagaggtagctggtcattttctgtgcgtagtggagttcgtaggggattgggccggtgggtgtttgggtttggcgggggtcgtcggcgtgcgctgcgtcgatgcgctcgagggctgcttcgtatttggtcatttttggggggttgttggggtagatgggataggtggtttgttctgagtggtgtcgttttaggagaggagtttgcgcttgggatcaattggatgtaagagcgcttgaaagctgggtggtttgatatgagggttttagataagaatagacgctagtccgggtgtggcttggtgtgcattgtaaatagatgtttctaattggtcgagtatgtattggatccacatttagttagtcccttgtacatgacgaaggcggtagtaaaagcggtaacccgattagggtcccgaggtcctagagcccctgaagtggtgatctatgaaagcaaactagttaacaatgcaaatagaagagttgggatgactgtgtggagaaaagcagttaaactacatagcaggtcattttgaagggtccacttgtccagactgtgggggatgactaataattcttttgcttgctagttagttagttaactaacttacatcccatcacatccatctggactctgcctgacacaatacataaagaaaacttcgatttatctaatggccatcccatggagaatatcgagccgtgctatccctccgaggagcattatctcaccgctttacattatctccaggaacatgtctacccagatggaccagcgcctctatatttctaccgttgatgctgagccacttcatcgctaccgaaaaggtggctaccacccagtcaccttgggggaatacttgaaagatggaaggtataaggtgttgcataaactagggtggggaggctactcaacggtttgggcagcaagggatcaaaggttgtacaagctggtgtgacccgaaatagttctagctgactgaaaacagggaagagacatatgttgctgtcaaaatttcggttgcagaaactaaatatgacatgcgagagctacaaactatgaaagagttggcatcttatcaccctcacacggtacaactgcttgataacttcgatctaaagggcccgaatggatctcataaatgcctcgtctatgagcttctcgggccgaacgtcccagatacaattgatacacgctttccagatgggagacttcctgggaagcttgccaaagttattgcaaagcaatgtttgatcgggctcgatggtttacaccaacgaacgattggacatggaggtaaatcacttttcttagagatgctttatatggtatggcacttacctagcatagatctgcatacccgcaatttagccttcactatgccttacatagacgatttgtcggaagaaaggtttattaggatgctagggaaaccagatattggctttgtccaaaaacgcgaaaattgtgataggaaatgcctagaacttggcatacccgaatatattgtgaggcctgcctcgcgtcagacgctttggaatccggctcagactgtcaaaatactcgacttcggagagtcgtttttacacactactattcctaagatactacacactcctttatctctccgagcaccagaagttatctttcgggatcgcattgatcatcgtgttgatctgtggagcatgggctgcatggtaggtgaatccacttgtaatccttataaaccaaagactgatatgttggcagctctttgaagtgttcgcaggccagccacctttcgacaccttcttaataactccaacaattctcgttgaccaaatgcgagaaatggcaaccgacagtctacctaaaagatggcaaggggtgtggaatacgatgaatgcagaggagggcatagaaagtagcggacctaacttacaggaatggctggaggatgtgtacttcaatagcccgctgagtcccgatctcacacgggaggacatagtgaggctgggacaaatcgttgggaggttattgcatttcgagccgtctgcaagagcgtcagcgagagacgttcttaatgatccttggttgaatgagtgatcctatgactatttgttataacggggagctgtcctcattcgtactgtacctagaaattttcacttcttcgattatcaagtctgcgtgctgaaaatagtctctcttcttttgcatcgaccacatcaataactacccaagaaatgtatgcttcacatacaatgaccctgacggctaattatcactgtaagaaacatccaatttgaattaacacatctataggatttgatctttcccaaacgctttgaacagcaaagaaagacacctacataacatcaatatccggccgatgattaacctgcgacgaactatttcgggaccgagcactgtcgtaattacaacacgcaacagcaacacatattacacaatcacaatcacgacgaggtgctgcccttttgggggaacacaagcagctcttgcgaaacatcagaaggcgtcctctccacctggtaagccttgtccttttcaaagatccgcgccacctcttccaaagacagacctttagtctccgggaagaggaagtagatcgttgccatgaaaatcacaagacagcccagatacaccaggaagtatttccagtggatggccgccaaggccacagggtttatatactggttgaagaagcaagccatcgagtcggtggtgagtgtgatggcaaggcccttggcgcggagctggaagggcaggatttcagctgggtatgcgataaacaagggcatatatgccatgtcgtaagcactgcagaagaggaaaagcatgggtaccaccgcaatgccagcctccagcacatgcatctcttggaaaagacccgacatggtcgtcgcggcggataggtagatgaacatcaacattgtggcgattagccagagttttcgtcgtccgtatcggtctgcggccattgctccgccgactgcgaatgccaggttccacacctgcaagctgatattgatggcggcctggtgagatgcgttgtatataccgactgatgctaggatcggggctaggtaataagaaaccacgcctagaaaaagttggttagaaatcggattagaataaaagggacattttaggttcataccatttccagaccattcttgcatgaatcccagaatcacgcaaatggatagacgatgcatgttgctccgggatgcaaagaagctgctccagcggcggcagctcttgtcagactccgcattgatgctcttgcaaatctggtagaattcgtcctgaacaagttcgtcgttctcatcaccattagcgtgatatcttgctagtatagccattccctcatctttcctgccccgggagaccagccatctcgggctctcgggaacaaagcaaagcccaaccaattgaaggaccggatagaagatctgcgtcaagcaggggagtttccatgaccaactccctacgatggtgagtccagcaaaaccaataccagccgacgtgatcgacccgatgaaccaaagtgcattgtataaacccgtgaaggtctgtcgttgacgtgggtgtgttgattcggtaatgagcaatggcgcggcagtttgtgagactccgactccgattccagcgagaacacgagcgaagaagaagacccacggattatttgtggcgacttggataatcgaggcgatgatcactaaagtggaaccgatcagaacgcagatcctccgccccagattgtcggcgatgtaagatccggggatgaacgagcaaaaagatccgagtgagacagctgcgataataagacctcgagcatttgtgtccaggtctttcaaaaaattcgagactgttgttttctttgattagctttgttcctatatagcatgatgtataagatgcctacattcgggaagcaccaggaggccattgatcatgctagcacagtatccagctgtagccgatgcagatagcataaacccaatccctaggtttagttttcgcagccctggatccttcatccagctgctgttggtgttgttgtgtaagaccttggaggccatgtttggcgatatcctgcaaagacagtgaatgtcgtggatgaatgtttcagatcttgaactccgagctgtcaagctcttttatttaaacattgaaaattaattggtaaaagaaaactccgagtgacaatgcgccccaacattcctaggatttatccagggcccgaaatctccgcgcgaggttacagctgtagctaaggagttggaatgaagggagggaagtcaaatgatctgatcaccggacgatttccctgagtttgctctgatccaagagcttggatgtgacacgcctgtcaacatgcctgcttaaggtccgcgattggaatatgagctttcaaggtcttggagagctcggatgtttcaggaatgtttgtagctctcatagctccctcccctcacttttacccacggggatcacttccccggttgcctaagtttagcttgggattcgtagctatagtctccgtatggattcccttgattattggattcgtgatagatcgactcgcccttactcaacgatttgtctctggggaaacggggtaaggaagtttttctctgcagaccttctaggacaagcacgggctatgattttctttcttaggttcgtgagtcaactcggtgtaactatctgctctgcctgtgcgtcacttgatatttgaaaaggtctgaccacggagagtctcgaatctgaaagccatggcagcgtggaatgatattacttcgttctgacgcggacagccttatggcgccaatcggaaaacctcatcaggcaacccggtggcttatggtttccccctgcttagagttgaagcagattcaagaaaataaactttactgtttatgatatgacggttgagtatactactactagtagtaaatgatatcacgaagcatgagttacattgtagattagactgtagaattgatagaatcaagcaacacccgaggttcgtttgaaacgctccggatgttactcctgagcggatgccgatttccatggtcacacagcaggattgaactacccaagtaatttcgactcacgggctagagctcaagagcgttatctaggggggtattcataatattcataagagtgccgaactaaaatccaaggtagtcgattactaaggttagttagggctcggtttgagcttatttggttccaaggtttgtgtcttggtactataaaagcttggaagcttggaagcttggagaaatgatccctgaggttatatacttcatatattacgcaagtatctgtttatgagaagttatctggttattctgcatctcctggagcataaaattgtggatatatatccgaagaaatatacatatcaatgagacgtgcccaacgatatgaaagtcagaatacaacgatcccgtatccacaaagatccaagggcactataggccttacaggagtaattattcgtgatttctgtttctagaacccacatgaatctgtgttgttggcaaattgttgcttataaaccaccgggatgagctgtcaagtcttcacgggattggaagctctagcttcggagagaccccgagacccccaggatccccactaattgaataggggtgatatgctctgactcgtcaatctcattcagccaagagaaactccgcaggcactgccacgatgccaaggcgcagaagttgtttgagacaccggaggccttggcgtgagcttacccttaaaccttagatggcggaagattttttgtcttatctgatcttcatctcgagccctaccttccataccatcagagtcctacatcaacctactcttggcctccccaaaccgaaaaaatgacactcctccacgaccctctaaacctcaaccaatacaaaacaactatatccgagccaaaaaagaactgggtcccaatctctttcagcgacgaaaaggaaaagctcacgggcttctacaaagagcaaaatgaaatgatcgagggcttcctcacagccggcgaggaagagcgcctaaaagccgaagacgaagcccagaacggcggcaaagtaaagctagccgtgcgcgccagcttcacagtcaacttcttcctcttcgtcatccagctctacgcagccgtcacaacaggctctctcgccctcttcgccaccgccgcagatgccttcatggacctcgtttcgtcggttgtgatgctagtcacgtcgcgcatgtcctcgcgcccaaagccatacaagtaccccgttggccggcgtcgcgtcgaaacaatgggcgtcatcatgttctgtgcgttgatgaccatcgtggcggtggagctgatcatcgaatcggccaaggcgcttgcggccggcaagactgagtccgagcagctggatctcgtgccgctggtctgcgtgggcgtcgctatcttctccaagttctgtatgttcttgtactgctatggcttgcgtcggtatcccgctgctcatgtcttttacattgaccaccgtaatgatctggctgtcaatgggtttgggttgatcatgtcgattgtgggtgatcggttcgtctggtatcttgatcccattggtgcttgctgcattgcgctgcttatcttgttttcgtgggcgtcgactgcgtttgataatatgtggttgattgtgggcaagtgtgccccgcgtgaattcctgaataagtgtgtctatgtgacattgacgcacgatcagaggattcagaaggtggatacggtgagttgagaaggtgggtgtattattgacgtttgactaacggtgcatagtgtcgcgcttatcactccgggcagcaactctatgttgaggttgatatcgtcatggaccctgagactaagcttcgggagtcccacgatgtaagccaagcgttgcagcggaagttggaaggtctcgcggacgtcgagcgagcctttgtgcatgtcgattatgattatgagcatgatgtcaacgaggaacacagaccactctatgagattggtggatcgaagcactccatccgagctttggtgaaacgattgtggtctagaaacgaggacaaggcagacgggactgctgtgtgagaagcttcgggaatattgattgagctgggctccaatgtctcggaatgttatacgcagagtatgaatgcagtaaacaaaattaatatcttaatcggttttatgaacgccgaaatagtttctcacagggcaatttgtcagacataaaagcagaacatgacattaacactaccggacgttcaaaaaatgatatcatctcatataaacactaaagggcaggggctctcttcttagtcttcgcaaagatgccataaggcttgacactaaaagcgccattgaaattcttcccttccatatcaaatgtatactccttatccgccaactcaaaatccacatctttgatcatgcgaacgagcgcatgcaacgaccattcccaagcataccgcttaccgtaacactcccgcttcccgttcccgaaccccttcttcacaccgattgggagctggtcaaaggcctcaccgagcatgcgctcaggcttgaaagcattgggatcatcaaagacagcagggtcacggttgacagcagacagaatagcaatcagaggctgagtcttgggaatttcgtattcacctccgagtatgaccggaccatgagtgggcaacggctcgaggttgaaacccggggctgtggcacagagacggaacgattcgcggaggatggcctcgcagtagggcaattgcgagagatggaagtgttcgatttgaccggagggaccgaggagggtgtcaatctcctgacgggcacgagtaaccacatctgggttcttggcaagatagtacagagtgaaggagaggagattcggggatgtggcgctgccgatgaaaatgttgattatctcgtcgatgacccggctgtctggaagggattcgcctgtcttcgggtccttttcgtggagtagagcatgcagcaaatccctctggtctatagacttattgcgtcgcttggcgattatctgcgcgcaatagtcgcgacaaatcttgatatccttgtcgaatgtactctggtacatgagtcgagtgaggagcttgggccgcgtgggccgacgcacggcttcaaaggtcgtgtctgacattgctttgatgacggcgggttctgcaccaaggacacagtctacatactgaccgaagaagcatttcatattggcagcgtggtttagtcggtccaaatcattagagacatccacgcgctgcccggtgctctctgttgaagtccatttccagatcaagtcgtccgtcgtgagttgtatatccctatgcatttccttgacggcctcgggtgatacgaatggagccatgatacgatgcgcgatgccccagctttcctcgttgtcaaacgcagtaaagagactgtcatggacaagactgcggatttcgacaatgggaccggtgacgcattttcggaagcgcttctcgtcgcaaatttcctcgagaagagcggcgtttgtaatgaagacaagttgcttggtgaggattttgattttgaagataccagctccaccatgttctgctgccagcttatttaaagacgcccaggtattgccagggatcatatcgaagatatttcccagaattggaagcccctgaggctggggaataggcgacggcatggtgtgtatagactagagagggagttgggaatcttcaaaatatggcaacccacttgtacttatcagtaggacgaaaggactcgtcacaattgaaaagtatgcaggtaggagctcgcagctcttgtgccacatgactgaaatgacaagcctctgagtggtccacaattagctttggtgacattgcgatgagcctgaagatttccgtattctcgtccaattagagatcgtattgtcacaaacatcggagaggtgcagctaagctgcagatgaactccataccccgcgtgcccacatgatatgtgatgtgtattgcaagtgggaagatcaggggaagagcgtattgaaatagagaagagtaaggggtagagttggtgaatgctgccctgagaaggcatttgaagccgctgacaaaccaagtagacaagctatttggcatatcaagtacaagccaattacgactacatattccaaatgcagcttctactgtccaatgaagcgtcttgtcatctattgaatcgattgactaattcttcctcgcctcgtcatcgcggaatgatatctccacgctgccaaggccgaggatccaaaaattcatggatgtaaaaaaaaaatgtaaggaagtgtcatgcacactccctgtaatcattgatgaacacagcagaccatcgagggtggccggtagaagaatcatggaaacaagctgcaagcataagaaaccgtcaagaaaatcagaataaccaaccattacagcagcagatctcgaatagctgtgcgcgagatataagaagaacagaaagaaaaaaaaacaagggcagggaataaacaaagcttacgaaataaaagcaattgatcatatccactttggataactttgtctcccgcccaaaacgccgtccgattgatgaagccgggtatatccagcaccgtgatgcaacatgtactgagaatgaaaaaaaagagatcaagaggagggaacgaggcattaagtacacgcgccttgccacagtagcaagactcgagccgagccgtcaaccccatcacccctaggttaatatgggcagaattggtgtttcatcgaaaaaaaataaacagaaacagcttttggttgattcgaaatgatcatagaacccatttcgtcatctggccccaatgccgaacatgcctaccccgtagctagcgcttctttcggacataggggttgacaccttagcgacgtgaccctgattagattaatttttatcaacagaattagttgccatggggatgctttaccttcttgcgtttcttcttcccagttccctcgccgttcgagtagaatccggggtcatcatcatcgtccacaaacccttcgccatagccggcaaagctattgtcatcataatgtcttttgcgacccctgctaggccgtggccgatctgcttcctgtggttgcggagatgggacataggattgggaagagaagcgaccagcaggagcgggaggagccttcttgccaagctcgcctggcgctggattcttagccgccttttcatgacccaagatatcttcccagaaatcgttgttaggaatcggtccgggttccatttgcatggctcgcgattggagattttgtagcgccgaatccatgtctgagaccttgatagctttgccatgcaccttttggttctgccattcctcttcaggccatagagtcatgtacctcagactgccaggggtaccgatctccttcttgacgggtttgtttcgcccagagagtcccagtcctttcagctttccttcgtatgatttcctcaagcggttgatcttctcccctgtcaccggatccatgcgtgctaccgagtgtgcgatcgggcctaacccatagagagagacgagatccactgtagggtcgggaccagtaacgatcggagctgtcaatgaggaaaaagcagtgttaacaacttcagtcccaagaatgtgcaagatcagtacattcatggagctgcacacagtagatggcatgatgcgttttggggaatcttacatctcttgcaaagatgaaaagccgaggttagctctttctgaagagaatcgagatcgagactgagggtgtctgcccgagtcgaccctttattcatatccatagcgtcggagtctgtcgaatgttgaccttgcccggtggcaaagtcagtgctgtctgtttgaaaagattgccgatcgtggtcggtcggtctgtgctgtgttgattgctgagcgggacttgctcccgagttttctgccgagtcctgcatccccatattgaaagattttctcccctgatccacatcgtccgaattcgcagtagggtgtccactgacactgctggcgggagtggggaatgcattggtggtgctcattgtgggctgttgggagacttgggtagacattggcgcagaggacggaggggagatgttcggagagtggaccgtcgcctgattcggtgatgatatgaagttggcggcatgacttggttcgctcaccgacatcaacggaggtgatatcggggtctggggaatgtggtccgaagaaatagggaaccggatgttctctttcagagacccggcgggcgaggagggtgaaggaggtcttgcttgaaaggaggtagggtgagtgcgatcagacatgagagcccgaggaagagttcagcatgcagagacggtattaaccagagcggctctgggtccgaatcgcaagtttgataccagggcctggagagggggattcccgatcacggtcgacggtcgctcaggcaggcgggcaggtcattcaacgggcggactagatcgtcttcattccaggggactagagtgaatccctgcgagtggtaaagattgggtgcgtgatgagtggcggtggtgaaggagagtgatgatgggagataatcctgtggtcaaagccggcgaggatgacggcgaattgattaattcacgtgaccgggcttggcccgatgtactttattcccattgtactctattgatctatgtacaatgcaggtattcattcatgtatttgtctattcattgctattctctgagttgggtctttattctcaatacaatgcgaccatatcagtccatcaattaactgcaaacaaccctccccttagcgagtggcgagatcaagtaagattaaactttgtatggcccctacatttgccgggaataatcccccgacacttgatcaatgacattacgcgttgcattcatatctgtaggatatgctaatcagattatgccacacctggacactctgcagatgttggtggcgtatcccgggtcttacatgcgtccatttttatcccaaccctccaagtcatgaatagaacagatatcaaatggaacttgaaacaattggaaatggtatctcttactatttaaagactattcgacaaaaacaaagtcaggtggtccaggatgcctttcttggcatgggtgacctacagcccggttggtaatatgaccattcaagaagacatactcgtggatgtcagaagacgaaccagtctaagacagaacatcaagtgatatatcgggaatcaaagcacaacccccaccaagcgccagagctcatcaatataaaatgatgcccgagagagatctgacctcaggactgatagtaagcattatactcattaaccagttgggcagacacgtcgggtatattgtgttcgagggaagccaaaagctcgatttgctcttgttggctgagagtgcgctcacgccatgaaggtactggaaatggctcgtggaagtactgagagtactggtctgcaatggagctggaccagttcatgggattgacggtcgcatcggtgtatgccaaatgacctgcggttgtggaagcaagtgagaagttggggtcccagccttgaaggccgggaacaactgaaggtattgtgttataaggggtgttcgggtcaattgataaatcggggtagagcgtcggcccagagtaagctgctggtgtataatgtggtaccacacttggggctgtgattggtcgctgcatgtcaaatgtacaggaaaccgatggcacttgtggttctttagacggtctagggcccactgcaggtggggttgattcttgcgcaaatgtaggatcagccgactgtgccctagaacaggtaccgtttgaggcggtatcgattgatagattgccacggtggttgttggaataatacgaagcagtcgtgctacttgacgggctggacatggctggaggggtcagtccctgtgaggaggttggcgtaggatggttagaaggcgagtgtacaacgaacgattcttccgtcctgtacgctttcaggcacgcagcaacaaggcgcctgtaaagaaggaaggcagattggacacctggccaacgttcggcggaaaatacaattacttccatagccatatccaaatggccttggacttcctcaatggtgtgctcttttcgaatttcggggtatgagagggtccagagcacagtattcaaagccatgaacagggcttgcacaaacacccatgtcaggtcgacagatccagtgatcatctgttctttatgcatggcgatattggagatggccgcgtcataacaggttttggcagcattgacggttggttcgggtatttgtggtgagggacgatacatgagaacaatgatggtattccgtctcccttgaaacctgtagaagttattgtcagcaaagctgcattgggggaaatgggtatatcaacgaaccatttcacgttgagtccactgccatcatcgttcttaggagtagtggccatccaatggtcaattttggccaacatttgagaaaaccatggatcctgatcatcaactgggctctctcgtctgtttgagtagagcattctcctgggctccaattggagcagtcgcattttgaaaaagtgaactgcaatacactttgctagaacgggtttcgctcccggggtgatcccctcggcggtgatgtaccggtcatccaccagttcaaagaatttcacattgatatggtcgtggctgacgcagtagctactgcatcgacccagactatgagaaagaccgaactccattgatgagacgatccaaaataaccttcgacgcatgtcaatctccaatggatttaatggtttcccacacggtgatttggtgacggtggcttcttccgtcaatcccaagtcctgacaaagtttggcagccgtccccacgacccagtaggcagctgtgcgagtgggcgttaccattgaatatgaggcaatgagcacgaggcattgcagagcccctaaatccaatcgttttagtgtgggttccaggtagggcaaggccgcaaggtaataactatcagcgagaccagcatattctgtgctcattttctgcatgctgatggcgatgaccatccgcagttggaagtttttgcagggatctgtagagccattgaatacctcctctacctcttgtcgaaatgtgggctcgtgcaggagcggaagtagtgcttgtgctatacaacgaatcagtcacacgagctacaagaaaaagaatcagagcaaagtgatcgcagtacctttggccacaaaaagatcaatcaacttataggtcagggtctttggaggtagattgggttgtgggatcgagcttatcatgggatagacttttgatgtcggtttcgagtcttcttgggtgaaggcatctttgatctcttgtgcggtgaattcgggaacaacatccttgatgcttttggagtcggtgttctgcttggccatctccatgaccaatcgggtcatggcgatgccactcgaggcgccgagatatcgcggctcatcgttctccttgaaccggatgcgcccggccccccgcaccatcaactcggcatcggcagcatgttgtacctcgttctcggctttggcaagctctctttctaatgcgcgggctttctctctgagcgataggatgtatgttcgaggtatagttgtgtcgcgggtcgagtcgtagtacacgcacttggcattgcttcgttcgcagggcgcacatcgtggaattccggggtcgcatctagattttcgctgcacgatggattagttgggaaaagcaccaaaaaaaagggcataacactaagggaggagcaaaaggttcaaggtgacggggatgggggagaggggatgtctcctacatgtctacaccttgtgcaggcggtcaatgtgtgagcgatgcgaccgtccggtggctctaatgagtgtaattccggcgactttagccctgtggaggaggagtccggacttggggtcatggtgggccaaaaagggtataagattaaggaagtcgggaaggtccaatcacattatacacgatttatacccaagggacctttcgaagaagcaaattgcgaacagtcgacatgatcttgaggctcccgaggccttgacaagggggagattcgagtttgaagatgtgaaacggagaagaagttgtgtccggaatgggaacgaggccactaatatgcttttccaagggaggggggccctcggtccagatctggagagaaggttgggcgtgggacaaggtgaggtggatatggtggaggcacagagcagctgaaaagagagacctggactagtttagggaatagatggtgtgatgtgggtgtttaatggggggttgctagtatttttccgatagttgatggtattcaacagtggtttatagtggtttaatcgacgtaaccaacatcttcatagacacttcatagccccaagagcaccttagtaataaagacggggagattctcgccgtccgtgcggttccacagatcttccctcccctccctctcctgtcctataacagccggtctcgtttaaacacatcggatttcggtggagttggcttttctcttcaacgtcttcggctaaggcttatttctcgagcattagtcgctaatcctttccctccagggccagctcatgcaggttcaccccttcggccctctatttaatgtcacgtgagtcttttgtgccgttatgtggagatgtgcagggggggagagtgggggtcccatatcctcgaatttactgaccgtgaccagtataatgagcagacatgtccgtcaccgctacgaccttcttggataatcccttgctcaaggtgagtcggccagtcgccgcctgctcgagatgtcgcaccgcgaagatcaaatgtgatggcaagctccccgcatgttcggcttgcgaaagagtcggcaaggcgatcagttgctccggagcaagcgatgaattcgccaaggggaaagagagaagttatgtcgcatcactggaagggtattgtgagaaactcgagaagaagatcagtcagatgcgtgcccgatcaacctcgctgtctgcggagggtgatgggatccctcgggagatgtcaatcacctccgtctcgtcagagagggcattgggccctgcccaccgcagagaggtttcggacattgacgatttagttggcgattttggtttcttgttagtatggctggattgctttcttgaccccgctgacacttcaaaagatctgtcaatgcgacttcgcgagacttccacggcatcacctcgagtacctccttcgccaaccttctcctctccgtcgctctagtcgattcctccccaccctcctctccgtattcactacctgcgcggcacgaagcaaccccgttgctacaatactatttcgataatatctttgtccagctccctttctttatcgaaacgagcttctggacctcggtggatgccgtatatcagtcaggcggccggttcgccaaaccgttcgatcattggatgctgcgcatggttctcgctatcgcttcggcgtcactctcataccatcacaatgataagagccaccaaagggcatgggctctcgtgtcggaggctttaacatatgccgaggaagtcctccgccctgggtcaatctcgggaatccaagcaatcctactgcttgctcaatattcttttgttgacccagtacgcttccggagttggtacttgattggaatggctgtcaaggttgcgatagatctgggcttgcatcaagatcccccggctgaggttttgactaatcccgaccgacttgatattcgccggcgtgtgtttcattccatctattgtctagacaggttcgtttgtttctgttcctcaattgctgccttgctaatcttctatcacagaggattgagtcctgctatgcagagaacctactcgttctccgacggatctgtaaatgttgcattgccatcaattaccgcaccaggggccctcctagagcagactcacattttcctgcgcagtccgggacctgccttgcatatcgttaaaatccgacagattctgtccgcgggctaccaagaaatgcactacagcgggcgcgatccatccccgcagcctcttgtcctcatctggactctgtgctggcgagcccgcgaatggttccagcaatgccccaaaaatgctccaaaccacttttcacttctgtaccgactagaattattatacaccattatcatcttgatatccccttcacatcgatacccaattctccacgactacagcaaggctctcttattcgaccggtgcatggactacatcagccaaattcaccaggttctagaaaaccccagcgccctgcccttcctgacatacttggacatccagcgcgtgcaccaagtgggtcgaatatttgtcaatgtcctgtccgacaattacgacatgctcattagcgccgctgtcccagcacccccgcccgtccccgctggcactccagagccgccagtactgggcgacgaggacttgttcaattgccacgcacgtgccatccgctgcctgtcctatatccgcgacatgctcaaatattgcgacaggaagtgggacatacatggccatctagagcagttcgaggacgagtctgcgtccatagagaaaactctgatggatggctcggtgggctacatgtcgagccaagagatatattgtcaagacttgttgtcgggaatgccgctggccggcgatgcatattcggggtaccatatcgggttatgaaagcattttctgtgtgatatttgggcatatgaattcggaaaggaaatgagcgtggtttgtttttggttttgtgaaatacccctccacatgatgtgtataatgaataatatagtgtgaatcggtccaataaatgggttcactacacactggtactttactggaacttacttcgagctgtagtacggtgtattgatgtacaacacctacctgccttacttgcaaggaacgatgctgtgttaatgggcaataactccatgacatcattttgaacttaatcttgcattttaggaatactatttagaatatatatcatgcattgccaattgtaagttaaccattccatcacccacattcaagcctgaaacgattgggctttatagattgctcatcatcataaacatgcacagcgtcatatcccatgttccagtcaactcatagcctacttgagtttataatataccgaggctttagatttggcacgtgaaatcaaaaaccacttgatgctgatcccgatgcggcagaatatactgtagttacttgtccccggtgacatattcttattctaggacaacatatttaggtctacagcgccatgttcttcatgaaaacagcaatgatcacaagtgaacaaagcaaggggaagcggcttgtccgagctatgaatcctctaaccattcccgaggtatgttgtggatggttcaactgcaggaactactgaaccgatccaatcatttacttgtggactttacttgtggacctgggcttgggcagaccggtagttttctagacgtttccacatgatccaaaccagccctaagattcatggagtattgagtttatactatagcacaataaacacaaatgaatgtatagcagtcactgaatatgccttgctagttgattgctgttaaacccgcgaaggccgattgagtctgcgcctagcgagtcatacaatgcattagtccggctcgatccgaggaattactccattcaaagcgagtggataggccaaaatgtcctttgttgagggtggatatacgacgtgttgtatgtactccgcacatacggacctcgggagtagtagtggaaacattgaagtgccttataaaccaaatcgaggccaggccggcgaatttcggacagaatgggaatacctaaggaaacaagcatcttgtgccctagcattcgaagacagcaatggtccatggattattgagttgttatatcattttctcccgatttggcagttaccccttatagttgaaggatatccaatattaaaaacggcaatagatcggaaaaaccaatggatcacggcatagcatgggcctatgatgaaaaaaattcaagatagggatagtcttgtcggcttctagaagttcttattctagtccgatatactagtgtcaacgggaattcaacggggaacccaacagggaatctccgaagtcttctccgttcctgctgatcgacagagcctctctcttgggtgatgtacggtggcacccaagcttttgacaacgcgatcttggatcccaagtcccggcagtggctggcggtacattatccagtggagtcaagtttgaccatcgcctttgttccggtcaatcttaacggccttggcggtgaatcgatcctgagtgaccaatggaagcccgtctccgcagccattttatttttatcgaaggaacgtggactggagacgtgtggcgtttgcaacggaaaggggggccgttggctaaaaatggccaataagggtatcttgaatggcagttaggtggagatagttcggtcaggatgccggctgattggcatttagttccacgctattggattcagaccccatatgggccttttcaggcagttgggttcccctatgtggcgctttgcagatcgttctttgtttctcgtggagtgccactctagttcagagcgagaacgacaacaaagacaaaaagtacggagtgcgtatggcaacaataatggggattccttgacacagatgatccgctatttaaagtgggtttagaatatcagggggtttactgccatggaggtactacaggcgctgagttgtatattgtacatttaggggatatcaccggatgatcatttaccgatagaatctaatttatggttaattcacagagtttactccgagactatgggcaagcccgcgagtataagctcacgctagcccaatctacgttgtaagcccaagtatggagtaactaaacctcgaggttccatgcgccctaaacatgggcatgtagatctcaatttgatcctgtaatccggtagcctccaaactgacatgtttgatttcaagaattctacgatttgggattgtcgcgttatttctagggcaagagtgaggacttcaaagcatgtctaaatcttacggataagcttcaactacaagtgccggacgacaacgccccatctcgtcaatgtttgtagacattgtcaatagtggacagaccccgttgttctggttgattcggtccatctcggcataatggagatgctcgtcccacttaatgcttctctaagactccattatagccaactattgagctgacccgccagtctggatactgctgcttctttgacaagtaaactccctaacagggacaggggtagtaagatcgtacctgtagatcactcagttcatagtgtataaatacggtctttctctgtgtccccatcaaagttttcttcttctccaagcttcctaccacagtcattctttcagcaactacagtcactcttttcagtttttatatacctattaatttcacaatgaaggcctctttcatcgctaccgtcgccgccatggccggctctgctttcgccgctcccaccaccgttgttggtgccgatagcctcctcgtcggcctcaagattggcgacatcaccgcggagctcaagctcagcgagatccccgttgtctacaagctcggcgacctggccaatatcctcgaccttcccaccccctcctcctctatcagcaaagtccccgccgtcaagaacggtcacctcgtccaggacctcggagacgaggtcgacaacatcctgaccgttgtcggcgaagacctcacaaccctcctcatcgagctgtcccccgaggtcactgccctcgtcgacggccttggtctcggttccctcggcgctcccctcggctccatcgtcgcctccgcctcaaacattggtggcatcgtctccggccttggctccgtcatcgacggtctcgtcactgttgtcggcgctgacgccggtgctctcctcatcagcctgtcccccgaggttgctggcctcgtttctggtctcggtctccctaccattggtgtccccgtcggtaccgtcattgctaccgtcggccagaacctcaagcgtggcgagattgtccaggaccttgcccctgttgtccagagcaccatcactgtcgtcggccaggacgccgaggacctcctcatcgagctctccccctccgtcacctccctcgttgccagcctcggtctgacctccgtcgccggccccattggctccgtcgtcgctgaggccgctaccgtcggtgagcttgtcaaggacatctccgttcccgttgcggatctcctccacattgtcggccgtgatggcaagaacctcctcatcaagttgactccctccgttgttggccttgttgctggcctcggtcttcccaccattgcctcccctctcggtgccatcctcaccactgtcgctaacaacctgtaaatgcttaccggcatgttatgactctggttgaataagcttgcttgcgtggaggtctgccatcggtatgactttggtactcactatataatcataagaatttattatattcatctatacaatgtccagagtatttgacacataagggcgggtaatactcatagtaattaatttgttcaggcctctaaatccaatttaatttagaagaggggactgcaacggggacagcaggagcaggtgtgagggcaaagttgtcacttggagtagtagggtactagagagcagaacaagaacatcatggggtgactcctaagaagagaaggtggaagcatcaactagttacacattatgtaaaatatcttggcaaggacgtaaaaacctcaaacagacatcttaatggagagagaagacctgttgcattcactggctaagagagagagagagagtaggttcaggcggggaagcaaggtcctatcttcccgaggcaaacggtctcaacaaatcttctccaagcacccggacaagccgaacagttgatgaaaaaaggagttcgcgtcgaccgggggtagtgtaagcccagtgacactgtgcaacgaggcgtatgcaagcacagaggccaagtcgcgaggtccaaatattagaataatcatgacgttctgcaatgcagaacattcagcgattaaactgaatagaacagatactacacatgatctaagccagaggcaaagagagctgaagaagaaagaaaagaagaggaagtcctgggggcagggctaccttcttataggtatcctaagggcggtcggtttatgccactattcataaacaaatgagacaaacaacgacatgggctcgcttaattaaatggtaacgtgatcgtgagagcaggaacggcgtctcttatttccgcttgacttgtttcacaactgtcattcactttggtgtgaggctataatgtttggttcttctgatatcagcaagagaagggctgcaggtatactaatcttcatccccgtggggccccacgttttgtttacagatctacggataatttaagcactctccacctattggttggcacgggatatatgctttgttctttttgaatctatttacaatgaacagtcctagactcagtttgccaagctatgtatttccttcagttataaggccacactttcgcatgaaaatcccgctggctcttattctcagccaacccaatagattcctgcctgaaacgctcattcgcctccatggcacgttcgtagtattcgggccgaacaatgcctcccagcggaataagccctgcgtcttggagctgatgaacaatgcccgaaattccctccaagagattcatttcgtctgtatgtctgagtagctcctcttccccgaaatcgactggaagtgactcttgctcgtacttgagctcagcccagcgcgcgacaagtttgatcaagaagttgcgaagagaaaatagatcttcccggtcccagcatcggggtactaaagaaatagggtcttatttcagctcgtgaagtggatcgttgagaagttgccttctgataggatcgtttgtctttgtgacatcatagtaatgctctagaagcattttttcctctttcatttgatcatcagggtatggcgaggctgatattccagcaatcgcggatgagaacactgtaaaattgaatagaaaagccttattaaactgtccctcgacgcatttgagcaactttacacctgtttcaaaagtcagtattgaagcgattgggtaggtagccacttacaagtcgttccggcatctccaccaggtttagcagaggcattcagaagagcctgcaggttaaatctgcgataacgcattcctagtttttcgggttctccactcctgaagaagttagagtaatacgaatctgctcacaagcgtgacatacaaccaccgatatcgttgatattggaataaatcatcttcctcaataggtcctcggtcaatgagaaatcacccgttccatcctccagcgctctccagagagatatcgtccttgcttgtggcatctgggttcttgttctctcaagcaagggaggtgacttgaggatgggaaaaccctgtatgaagtgtggcctcgtatcaacgtattcatctttggatggtgggctgaagactaaggttgaaggggtagtcgtcgtggtgtcggtgagccacacccctgacaatacacattgtaggtatcgttcgtatggcatgttcgtacaaaaggtacaaactgtagtcttgacttttattttttcgggatactagctatgaaacaaaacatttatataatatagcacaactctgtactgtgcttttgcaaaggagcctctatccccatatgttctttgcttgtatcaaattttcatgtttactgccaatactgagcatgcggctgatacattcggcgctagtgcaattctgaaacattcatccatgagattgtctagggaatactacctattatggaaattgcatagaacaagtatcccgaggtttagagcactaattcgctaagatatgttctaaaaatagaaccgtatcagcatagactttgtacctctactccgtacttcgtatatgaagtcggcggcgtactccgtccgtattacctccttaatatgcccgcatgtagcaaatatagtcccaagtaggtatattacaaatcaagtatctcgtcattagctctgaaatacacaaatgagtattattatattgcttatctcggtccaataacctttggtccgtacctaggtagctagctccaagatttgggtccgagcggcctatcagagcgtcgcctgggtccgcactgtagggtttgcccgaataagccccgcttttattctttgggtaggccaatggcggtcgatatatatcgagtaaattaaaggtttatctttgactttctccgccacctcctgccgtttgcctcgtatttctctccgcaggtcggttttttgcatacatccccttcctccacgttgtccccatctccccctggaggcctctttcgcttcttgtacatatatgcccttctcctccctgtttcgaccgtgcgacttatgttttataattgtatcgcaacaccgtcgctgccaacagcgatgtcctcatgtcccttgccgacattgccggcaggaatttcacctcccctgatcgctccggtgaccaattcgcggtgcatactgtagtcgcctgcctcatcggcattgcctggtacaatgccttggaattgatcgttctgtgtttcaccaccttcaagagatatggcgggtgctatttttggtgtctcctccttgcctccttcagtataattccgtttgggatgggatatatcctcatcatcttcaatgtatacgacaacatgtttcccgtggcgatggagctagttgcgtgggttgggatggtaacgggccagtccctagtcctgtggtctcgattgcatcttgtctgccacagccgaaccgtgctccgcgtcactctcgccatgatcattgttgacgcgatcattctccacatccccggggccgtccttgagctcggtagccattcgaacaaatcttctctcttcaccgacgggttcaacatcttcgagcgcatccaattggtcggattctccatacaagaaatcattctctccattatctactcctgggaagctgtgcgactactgaatctccgcccgagaggccattaccgaggtaccctggtccaactcttgatcgtgaacgtagtcatgattatgatggacgccgccgttatcggagtacaatactctggtctcttcgatatccatgtcaccctcaaggccatggtctacagcgtcaagctcaagctggaatatgcgatcttgggcaaattggtgcacatcaccgagggcggcagcggctcgaccccgaccgacctgtcggatttcgtggatctttccttacataatccccgcaccccgcgaccggatagggacacgatcagagagaacccagagaatggctccaacactcgggtgcgagtcccctccaagggctcgtctactgatccgctacgaaggagtctctccgcccatagtccgagttcgagtaacccggactactcttgatgatttcacatgtaataacgacctcttggatgtttctgtacataaaaagttacttagtatataatgacgacatagaccatactctcaccagtcgagtgttaaatctctcacctataataggaaagtaataacggcattgtcagacatcgccacgagcttgatatcaaatcgagcacggtacctcgtattccgtatatcaatccgcaatccccaaacccactgaacccacctatcgacccacccatacccaaatccacacctctgaaccccaactcacctcatcctatgagtccccgaccaccaagcgcaagcacaagacctgcacaagaccaaaccttcgcagaaatcctcagacaacggaacaatccttctctcctcgaactttgtgcgcgtaacggctggggtatctgacgtcggagaaggcgtcgggggaggttattcctgttggggatatagggaatttggccctggctttgccttgtcgaaggtttttgagagggggcagagtatggtagaggttattaggccgcgaattgaggggcagggaaaggtgcgctgtgaatgttcgagtaagctggggcctacatagtggtgaaggtgtcgtaataatgtatgacgtgttggtgatgccggatagtaacgtgatgataatcagaagtactgattattcttctatttcattccacaagtgcccgagttgctctctgtccatttcctctgaccttcattttgtcttagatttgaagatatataacctctcctgtgcctgcgctggtgctacgtccgagtgactcgctcatttgttcttatgctcctcgatagtactcttctagtgaatgtctagcgaatggagatattccattcaaaccagcaacgagccgcctcccgtcctagaaaagttgaatgtttggacatgcttcgttccttataatgcttcctaccgaagtcacctcggaggtccaaagagtaggaaatccatttcctcttcaagcggtaacagagtcttttccttgaaggcgttgcagtactgatcatcatcgaaactcgcatcggggtcgaggtatccttgtaggcaggtcaaaatagcctgggagaaggcagatgacaatctcccatgagaatttttctccttgagccatccctccgctaggtgaagacccgattgatcacccggtaagatattagtgatttgatcatatccgagtctttgctcaaccggacttccggaagtaatttcaagcagcataatcgccaaggcaagcaagttcgaacaggttctgttgataagtgtaggaccaggtcctgttcctggattttggatcagctgcgatgatttcgaaattgagtcctgaagcaacgcacctcgatgaaattctttcactaaggaagggtatcttaagtcgacagacaatggcatgttactgttggctcttgcgaacacgatgtccctcttactccatttagtttcaagccatggagtatggtttagttgaaaaatcgacgctatcaaggtgatggcgagtccgtacacttctgctatgggtagttgggcctcgaattgcggaaggagggcctcgagagatgaagactgctgaacgtattcagcagcggtctttttcaaggaagggcgtgatgccagaaagcccttatcattaaggcagaataccacaaatggatgcggggattgcctaatgactttgcataagcttgtgacatgctgcaaatttgcagggtcgtggtcgtcctctggaactgatatcgtcacacgaacagttcctgttctcgtgctactttagcgtcatcactagagctcaaaaggacagcaaaagagaacccaaaagtgcgtacctcgatgggagttcgtcaatccttatttcagaattcaaccactgagaagacgcgttgcagtccccacgaagacccaatccaaaacaagtcgcctgcgccaccaagttcaagctcgctgcttgcagaggcctcttcgttttctttggtctcaccagccgttgttcgaggagcagacatgcgacatggacagggttatcgtcacaccagtttcgagatattccttggtgtactttggtcgcattctcttgaatggtacccaatgatgcagaaaatttcaacttcagacgactctgcggtgtttcatcctgcagcttgtcagctctagttgcccaggcatcaatccgttttgtacaagtctccaaacgatctagcgcatccttcacgcgatttttcttcatggtaaacttgatcctccttccgaattcgaaatctttgtgaaggaacgaagtgttcgcgatccgcggattggaaacgacaatcggcaggaggtctttgcttatgaaaccctaccttccaagagagtgctcgaacctgctgcgatccaggaatatcgaggcaggccgctatctcgaccaggatttctgacacttcttctatggtgagaatgagtgggtcgtatactgaccctagcctatcgcgtagaccgtcagcgatgtctccttttctccacaattcgcttcgaggatcctccatcatcgtggtttggtctgcaacgtcggctgccttcagtaagacacggacggcttggtcgtaagatatgtttattgtataaagctccctaattaaccttcgcacatgccgtctccaacgaaaaaaatcttttgtgggagctgccaatttctcgtagttctcgagggcagatataagcagaggaatgactcctaggacgagtccagctacttccactcctgtcaccatcttggattgggaggccgttggcgagataaatcaacatgaaagaaacaaggctcttccctcttcccccgatcgagctatgagttattcccaggagaactaagaagttattcccaagggaaacgtgttaacgtggagtctctcaagttccaacacccgatctcagccgcacgtccttttgtcgtggcatcgaccccaccaacacgcagctcttggcgttagttcaaacgaatggtctttttacattcactcgcatccttccgttattggaaatttgattgtgatcaggcattggagaaaacctcggcgaaccgcgtggatacacctttggttccattaggcccgagtcgactaacaagtttgcaactcatcaactacgaaagataaaggtgattctcacgaggtgtacgaaacaagatttcctgaacctctaagatcgaaaccctagccatggatgacatcggcgttctttctacctcttgtctaagttgcttcgatactctgacacgatcgctgcgcacatcttcggatgagttcaagaaacagatgaggccaatagcaattgaaaatgaatatgcccgcttcaagatttgggctggcaacctgggcgctttacagagaggccggcattctcttgatgctagattacgagactcggtggtgctacgagcagccgtcctcaaattcatgggagagttacaagactctttgagaaagagtacgttgtgccacatctatgacacctcctatcatctctagttggaaccccttattgactgttattgcccaggtgccgagatcaccacaggtcttcgcctaccgtacgaacagggtggcgatgccacacatggtcccgacgaagatgctgaggacaacagtgacactagtggcaccagcagtgacttggagtctgcagaactagctgagagactcgatgaaatcaaagatatcatggagcacctgtataagctctccttcaagatacgcaacacgagatatcgttctctcaccaacaaagctcttctgatgaaagaagaggatccacaaaccgggaaagacttgttctcggcgtatgccatcttcgattgtcggcatgtacaagagtcactcaatcgcttgcgcctgcgtccgtcatcaaaggaattcgttactgaacctgcacgaaacccaagtgacgggtgtttcgatgtgttaaatggtggggatcgcctgttaaatagcgacgattttctacaagatcgcttagcaaaagcaatcaccaaccgcagaaagtattttgcatattggcggagacatgctctcaagctctcacacgttacggatgagctagccccccaacaaaatttcacaactctcgtgaagcctgcgagacctgtttctggacctccaaccacaccctcaatctcagggtgttccctaccgactccaggggcaaaaaccctggtttcaggaaccgatttctccttgtatagccatgaattggacgaccagctggatacagagaccgtgttttcctatgcgacaacagcctacgatgttgacggaaattccccagaactacctccacctcctcccgatgcggccacgaagccagagtttgtttgtcagtattgctgggtggcttgtccgtcgagacaaggaaaaggaaagtcatggcagtaagtgtctaagatcattgacaggataggagcatcgttctaatgaatgttagagaacatatccgacaagatctccagccgtacgtatgtacctacgaggaatgctcagatgccgaccgcatgcacgccagtcggcatgcgtggcttgaacatgaacggctagtccaccgccgaatatggagatgcttcgaacacaggtccttcagctccaaatcgaaaaacggcttgctgcaacactttttagactgccacaaaggtctagatgagcagcagatcgaaaacctcctggatatagccgagacgacggtagccgatgacagacaaacctgcccattctgcttctcgattggaccttttgctaaggggtttcacaaccacgtggctttccaccaggaacaattcgcaacatttgcagtaccacgaaactttgacagcaataaagaggcggactctaaaaaatccgaagggattagatcagctggatctttgtgttccgttgctctagatttctcggacggtgatagcagccttgacagcgacgacagcgacgtatcagtgaaccaactcggaaactccctgctaaactctgcgaatttcggagacgctgcggctgttaggctgctactcgagaagggcggtaatcccgacttaggggataataatggccagacaccgctattatgggcggctaagaaaggccacgaggcagtcgtaaagctactactcgagaagggcgccgatcctaccttaagggattatagtggccagacgccgctatcgtgggcggctgggaatggtcatgaggcagtcgtaaagctgctactcgagaagggcaccgatcctgcctttaaggatcatcgtggccagacgccgctatcgtgggcggctaagaagggccacgaggcagtcgtaaagctgctactggagaagggcaccgatccttccttggcggatacttatgggcagacgccgctatcgtgggccgctaagaaaggccacgaggcagtcgtaaagctactactggagaagggcaccgatccttccttggcggataatgatggccagacaccgctattatgggcgactataaatggccataaggcagtcgtaaagctactacttgagaagggtatcgatcctaccttagcggatacttatagccagacgccgctatcgttagcggctgagaccggccatgaggcagttgtaaagcggctacttgacaatggcgccgatcccgagtcgatagcgtgggcgcctaggtcttcagaatcagattcagaattagacgattcggatcaaggttctgttattcccgaccgcctcgcttcagaggattttacctaaatcaccgtgatttctggggataaatcacgtgttgcagaatgggagggtcacttcacagctgaaactaggcagtctgtgaggcgccatgtcgatctgaaaaagagaaagaatacattcaacgaaacaactaagacgaggagaaggaaagaagaaagtgtaaagtagaagcagccagttgatataaccgacaaacgttgcaagcttcgaacatctcgcttagctatctaacaaagaatctccgaagtaaataatgcaaacagtagatagtcgccgatccatagagtcatagaacagacaaccatgcaaacggtaacacagcccatatcaaaatgtaaatgagtataaaatgttgggagcaattgctcccgagatctaggtatcctgtaggattctgatataatcatggtacgtgttcataactgactacatactacttggtgaatagggatatctatgataggcagtctgggctagcaggcaagacaagagcgacacaataacactaaccatctaagcaggttagctagtaagcatagtcatacagacgacagtaaccatcctgtaaaaccctttcattccgtgtgtggtgtgtaggcgtgtgctctgtacgctgcattctatctgatatgaatgtcccgatatttatccctgcagaaacaaggcaactatcatagttaactagttagttggcactgactaataatgcaatagaggatcaaagatgtacggaaatgggccatttctgttgatactagtactatgtaaatcaaataaactcgatcagactcaagataaagacaaggaggtggatccggaatggaaacgctattctcaatccggtaaggagtgggtgcacagccccacagaagccacacccccttatttggctgtggctgcaagtttgaccttctagaattgtaactacattaagcgcgtcaaaaacgatagcctgtataccgctaccaaggataaaagcaggaatccaattgagtttcttcccctatgtcgtattgaagatccgaagtgttgacgtcaagttgagcagagtctgatatcgcggacccacatacatccatggatgatgatggaacgcgtgtgccaagacttcgatcccatcaaccttggaagttgtagatcttagggtttatggggatgtatgggcttttgggtgggaatctatacccctagctctcggaggaacactaaccttatgcagctaaggaagtggatgacgtgaatctggagctgggtacgtacggggtaccccatccaggtggaggttaatctgaccttacaccttacatatgacacaacccatagagcacccacccagcaaatcaaatatagctgcaacgttctaggctgaaagggacaaaagaaaatcccaacgagactgggagggagcagatgtccgtgttagttgtggccaagctgtgccacgacagagtgacgtcaggtgtcgatcaccgccgtagcagtccctacggaggctctttttatcgcattgggctcctggtggcagggcctggttctggtgtccagctcatcataatggcgctattgtcccttgtcttttatattccgtcatcccttccctcctactttgacttttctttcccttaccacattttccttcattccagtgataccccttgttttgtgcctacataggttcaataaatatagttaattgtcagtgagtgactctcgtttgtcctgtatgcaaacggcatctctgaccctgtcttttagtccatacataatacctcaccccctcatcattggtctgatatacatacttccatcatgtctgtgaacgttcccacaaatcctaaacagaaggagaaggtatggatgacaatgcgactccattgaaaccacactgacagagaatctccaggatatcaaccagaagcttcaattctttggtatctaccatggtaagtccagcttcacatcctccaattgaccattcctgtactaactgtgtctgctatagccttcaagaatagcaagctcccctcggtccgtctcaatctcctaccgccaatggccttgtcacaaatgctaactaggtctcctcccacagaacaagcaatgcgacattgctttgaacagtgtcttgaactccaaggccctcaaatctccaccaaaggagctctcacgcgatggaaaggtccttgtggcagatctgcgcaatgtcatcgacgcagcgaagaatatgctcttggtcaagaacgagggtaacctcctgcaagactttgtctggcaagcccagaggatgtccactggcaatgcggatgccaatcgccctgggctccccatcgacaaggaagccggtcagcaagatgctagcaaggccattgatggcctcaagaccctgggcacgctcatgatcaccaacggagagtttagaaaactacgtaagtgaacttccgttcgcgaatcacgggcattcctaacaacgcgcagtgagcgacgccatgacactgggcaaagacattgcggccgatgcttctcaaaaggccgccaaccaggttcgcccttcgcaggatgagctttcgcagatcgaccaacctgcagaggacaacgtgtggcacgagaaacccaatgtctccaaggatgacctaaagtccaaatttaagaagaacaaggctgtatgtattcctagtgcgctataattcggcacatactgacacttagctcaggataagggaagcgctgcttccgcttccgctggggttgccgaggaagagactggcgtgtcgccgcagagcaagaagagggaattatccgacaggaccaaggcttacttgtccgagaaagttcccaaggagcgtcgcgagcagaccatctggcgcctgaagaagatgatcattgaaatccagggtcatgaagactgtaagtcacccacaatctatatcgacggcaaagatttactaacaaattatgcagaccagcaagccgttgagaccctattgaacatggctgagcaatacgccggacacaccagagacctttccaaggagggcagtagctctgcccgtgacgtcctgaagagcgacgatgttcaggctgttcagtacaatttgcgcactcttatcgaacgctttgccaaccacacctctctagacggcttcttcgaatcgctcaacgccatttaccgtgaggctgagaaggaccccgaactccgaaactggttcaagaacgtcagcaacttgattcggtatgtgaattagatgattttccccaggataaaagctgaccggacatagcaaatctctgcgcgaacagggcttcatcatggaagaggaatgcaaccgccagtggaacgatctttacgacaagggccgttacctcctgcgcgagcgttaccgcggttactccgaccgcattgtcgacgaggtcaagttcttgggtgaccaatttgagcaggacgtgcaaaaccaggcccttgccgagtcgttccagaagctattcaaggatctgggccacgattccagtggcaggcctacctttaagccggatcttcttcgggatctccgcgatgtcatcattccgcaatttttcgagaacgtccgctatgttccaatcccccgtattgaagtagcggatcccatggttgatgttgtaatcgagaacctgtgcctcgagggcgacaacttgatgcccaacgttatggagttcggcagcgacaactacttccgctggggccgcaagaagatctccaacaagagtgataataagatcatgatttccatgtctggtatccagatggatctgcgcgatgttggatactacatcaagaagaaggagggcttccccaccatcaccgatcgcggtattatggacatcttcctcggcggcgacggtctcagcgtgaaactcgctgcctctaccgcccagccgagcgacaaggagcacttcttcaagcttgacagagtggatgtgaccatcaggaacatggatatcaagctgaagaagtccagccacaagctgctcttttacaccttcaagcccatgctgttccgcgtcgtcaggcctgctctgcagaaggtcgtcgaggcccagatccgcgaagccttcaagaagggtgacctctttgccaaggacgtccacaccgaggcgacgcgtgcccaggaagccgcccgtgaagaccccgagaatgcgccgtccatcttctcccgctacgccgatgccatccgagctcgcatgcaagccaaggcccaacaggccaagagcgccgcccagcgtgatacccaggtccaaaccgtcatgaccctccacgattccctgttccctggaatcgagcttcccggcgctgtatccaccaaggccaccgagtacgccgacctggctgccaagggcgcgcgctgggagtcccccatcttcagcatcggaagcgcagccgagtccagaggcatcccatccggcgggcccatcaccaggaagactgcccgccctgctagcagcagcggtggaaatgccgccgctacttcgaacgctggcaacgtcactaacggcaacagggtctccggatcccagccccgtggcggcttctccgatgaggttgataaggctttcgtcaatggcaagcctcataccttgggtgattccttcaagcatggcgctgatggtgtcactaatactaccgtgactaacggagctaacaattttgcaaccgctgtctaaactgtgtggccaaaatcggtatgaatttgcgtaatgttattgtctttgtttcttgacctttttttttccctgctatgatttccccttgtgcactacggatgttttattatttgtactagtagtatgagttaatggtagcctaatacatgatgccatcgttgcctgcgttctccagagtaacctcgagctttgaccaaagctaactcagtagaaacataagtacccagagtcgtggaaggtaaaataagcttaaaagtcattcatcgtcgtctataaaagaagtaaactgaactccactatataagaagcccggggaaggtaagaaaatcccacacattcatatcaaatcacaaatcaaatatctacgtgcttaccgtctacatctgatcaaagtacttctgccaccccaactcgcgcaacttggtacccttcaactccatgttctcggcacgggcagcctcggcatacgcctcgaccttgcgctgaatagccgggtcgaaagagccaagcacacgcgcggcgaggagggcagcgttgatgctgttgttgatgccgacagtggcgacggggacgcctattatgaaatgttagatatagatcgggtcaaagtaaatgggtgtaaaaggagagtaaagtgggaaataacgtacctcgaggcatctgcacaatgctgtacagactgtcgacaccgtcgagtgagctccccttaaccggcacgccgatgacagggagggcagtgtgagcagctgccataccgggaaggtgggcagcaccaccggcggctgcgatgatcaccttgatgccgcgcgaggcagcctggcccgcatactcggccatgtaatcgggcgtgcggtgagcagaggtaatctcaacctcaggctcgatgccgaagtaatcacgcagcagcttgaggcctgggacgagggtcttcaggtcgctgtcggagcccatgatgacggcgacagaggggacgggcttggagggaccggagggggcagccttggttttgatatcggagcgctgggcgcgcatggtatcgacgacgtcgatgaggggctggatcaaggtctcggcttcgtgcatagtcgcggcggtgacggtgacgtggcccattttgcggccaggccttgcggcgcccttgctgtagaggtggatgctggcgttggggatggagagggccgcttcggtggccttgaggtgggagtcgggagttgcgccgccgatgatgttgagcatgatggagggctggcgaagctcaaggctcttgggcgggatgggcaggtcgaggatcgcgcggatgtggctgtcgaattgggatagcgcgcagccttcgattgtccagtgcccggagttgtggattcggcttgcaagctcgcagagcatgaggctgttgtcttctaggaggaacatctccacgccgaaggcgcctttgccttcgaaggcagagacggctttacgagcgagagcttgcgcttgctggttgatggcttcggggacgttgcgggctggcgcatacaccagcttgcatattgagtcctcttggacggtctcgacggtggggtaagagaggacgtcgtccttagtcttgataaccatgacggcgagttcctgtacaaattattagacatgcatggcgtggtattcaactgctactaaccatcttgaagtaagcccatttttccgagtagagcgggcggtccttgagagcctctagggcctcgggaatatcttctttggaattgacacggaagtttccttgatactgtcaacaaaatgtatacccttcggcatcacatatgactcaccacgtccgtcatatgccatagtcttcgacttcaacatcatcgggtagcccaattgctctccaatctgagccaattcctcgggtgtgttgtccaccagctcccggtggtcggccatagggataccatatttgcggaggtgctccttctggttgaacttgttctggattgtccggatagcctgccagctgggttccacccgcaccttcgatgcaacctcctcgagagcgtaggtgtcgacgtgctcaatctcagcagtgatgacatcgcaagtctcagccagtttacgcacggcatcaggctccttaaaggagccggtcacatggccgtcgtgcgaactgatctgcttggcaggagagttatcgacgtccaggatattgacctgaatgttcaatcggttggccgactcgacgagcatgcggcccagttggccgccgccaaggattccgaccttaggcgagttccacatgatgtcggatcgaaggaataaatgagtcaattgatcgagatatgtaaaagagatcgacggtgcccctccactccgaaaattcgtggagagtcacgtgtcgctatcgataagctcaggccaatcaccgattcgactgccgcgccttgtcgcagctccgactctctgtttccccatgcacagctactgaacaatgtctctaggtaggttgacccatcacggtcgcatgatcagtctcagttgcaataggccttgctgatatcaagattacagacgaggaagctctccaaacagccgccaatggcggccccatggatttgtacgtgaagctggcatgtcaagatcccaaaacgctgagactaacgcgctgatatagagcaagatggaacggcatggctggtccattgattgagcgactggaatacgtacgctatacttcgatattcctgaccgaattatctaaccagtagctccagatcgtatacaatgtgtttcccatgcctcaagcgcgctccgaacccatcggccagcaattatttcccaaccattcttcccaggcgaaccccattctacccgaaaatagcaataaggaaaacacatcccccgccgatatccaaacttcgccccaagcgcgaactgtctctcccccacagcccgcgagcgcgggtggccagcttccacctccgcttgcatttcttctgagcgccatccgttcatcgatcaaaactttcttcgaggagaaacctccacataccatccagagactcgcagagctagtcctctacccgaccaggcactataggacgttacccgcatacctacgtgctgttgatcgcgttgtctcagtgacaagctccgcagatgttttcccatttcaaacgccggctgtcgcgattgctcaaaccaacgggatactgcttcctggcgatagcaccggggtatatataagccctgagtttgcccagggtcttgggagcgatgaatctctgggtggtgcactacttactccgatcccgtggttagtcaacgcctcgttcgaaggcgaggactccaatggcgatgcaggtatactagtcgatggtactttaccctataaccgagccactggttttcttttcactaatgttttcgcataggcactgaagctttacctacacagcctggggaacaggacaccacaaccctactatcagtcgaaaccgacgaaacggttgctaccgcctcaccagagctatctgacgaggttcctcacgcccgtggtccaatgctcctcggcgtggaagacatgggtctacaagacggtaaaggcgtcgaggtgcgtcttaccgcagacggtttggatggtgccaccgatgtccctacaactgttactcctaccatggcaacggaacaacaggaaaaagccgagtcaactggtgacaaggacggtgatatcgtccttacggacactgaaccgaaagaaggggaagaagccaagaatgaagcagagccccaagcaggaaatgcacggtcagaacccactggtgattcatcccaagcgccggacgccgagaagacagcataagcgagttctttttcttaatatggatttttctttttgtctgattttcttggttcatcctggattctagcatcatgagtaacgacctacaagattatatcgattgattttcaattaagggcttttgcaatgcctatgttctctatataatagctcaagcttggtgatagaaatagtaatggggctgcgactaatcctgaagcgtcataaatccaatccgttatcacctccatccttaggacacagacagttcataatatgaaatggtgctagcaaaaaggggaatcttatcttccagaaagagaaaaaccttagtgatttatactaactatctgagacatcaaatcggtctcaattagggcaagcacgctcatccgtacctgacatgatcaagacaatatcctacctcgtggattttcctgaggtcttcttattcagcactcgctaaagacccctcagtcatgtatatatagctataagatcagatgcattatcgggttgattctctcacgtatcgtctgccagaaaaacttgtctcctgtgaaaccttaaaacaccataattcacctgcaacgttaacttgaaaatccaacagcaattttactcgcgagacaaagtcgcatatcaaaagtccacatgacgctgttgtagtatacagccaagcccgaatgcaaacaaaacaaacaaagaactaagcattagccacaaacggccagacaaagaaggcccagaactccgccggcaaggtctgggccctcctggaaccgcaaaaaggtagaaatcatttaatatacgggctccggtctagacctcacagcttatttccgccctgcagttcgtctacccgagccgtgaaaatcgggtcgggaagggcgggtgatatacacccaggtgggattaagtggggatgtatggtgcgtcggtcaattgtatataggatttgggtgggggtccgccttggattcatatatgaaataaagcttacgagactagcactggaacgaagacccgacacagatgagaggaataaaataatatgttttgtaaatatgtacctgacgaaacaatctctccggcggtgaaatggaatgcatgatgagcccacggtggatatcgctgacgcatatattgtataaagtcgcacgcaagtcgccacccaatttaaagaaaaccaacgccaaacctgtaaaggtgggggacaagtgcggtcaatccgcgaagagtgtagcaaaatgtacgatttgaattttgaacctcgttatagacaagtgggaatcgtgagtcaatggacaggcggaaaggtgaagtgtagaaaatagaagaggagatggccgggtttagccaggtcggcccgcttgcacggcaagcatgggttggggttgcgagtacatgcgctgccgttttgacatgttggggttatcggtggcactgcccatttcggacatctgacggcgatgcggggggcgtaatggaggcccggttggcactcctactggtggtgctgggtactggacgccattctggtcaacagcgtaggcgggtggaccggtaacgtatggcccttgaactgccggcatgttcgttggaacagcctgcatattttggaattggttgggcgactgccagttattcatcgatccagcgggcgactggcctggagagctgtcctctttgatcgactggtttgttgaactttgagttgcagctgccatggtcacggcggcggcggaaggtcgtactggctccatccctgggttctgtggcgaaatcttgagatgatccaaatgcctttccagcatatcgagaagacttttgcgggtgaatggtttcggaagtacatcatccattcctaataagggttagtggaagacttgattcaattttgatgttcgtcttaccatgttggaaatagagctggatgtcgtcgcttcggatgttcgaggtcatggcgatgataggagtgcgatcaaattggcgaatgagatggcatgccgacacaccgtccaaattcggcatgataatatccattagaattaaatcgtattttgagccaccctgaattttgttcacagcctccaggccgtcaaactagaggaattagcaacgttgtggtcaataggacagactgatgacataccgcggtatcgataacacacgagaaagagtacaagaatttaccgccaatctgccgacaagtggcatcgtcttcaaccaagaggatctgagggctgcgcacccagccagggtccacattcgtgctttttttccggttgtcggcaaactgccgacgagcatccgtatcgatctcctgcttggcgggcattgggtaaggaacattgttgatatgctcgctgtacatgggatcgatgccgtttgtagcgcccacgggatagaccacttgctccagatcgccggccattttagggtaagcaagtgctgggtttggcggtacagttgccgcgggacggagggaaccatttcgcgcatgcggatccaagttgggagttgacacgacggtcttttgagggtcgttcatcggatcgacgccgttcatattgaattgtaattcggcgttcatgtcattcaggagcttggaggcttgctggaggggcgatgagggttcatcgtcaactgcaccaacctgagaagggctcattgtcgttccgggggcttggaaagtcacggccttgctatctcgacgctggcgcgcatccaccgaaagcaagtaggtcatcacctggtgaatgacattctcgtggttcagaaccgtcttctgcactcgcatcacttcctgtagcatgagctggtgatccaccgtgagctgggcatatcggtctgatagatgttggatctgctgctgttgcgcgacaatctgctggttaagaagatcaatttgttgcgtggggacggattcatcgctcggttgagtttgttttcgtggcgcgggcgcctttcgtcgaatgttgtcgagcgattctttgctgtttgcgcggaactctgggtgcttgaattcccatgcctgttgttatgtgagattcggtccaatcaagcttcaaattgggaggcctacattctgcccgtatggtgactggccattttcttcattgttttgtcgaactttgtggaaatcgtacttattcagttggcggacgaaactggcaaagttgctgtgtttaaagtgcttcggcaggatggtcttggtgaatttctcgcactggaatccgagttagccacgcgtcaaagagaccgaagctggacaaaaacacgggcgcattacctctaatacgacaaaggaatccccttcatcgccccagcgcacgatggacgaataggtcgggtcctccagcatcctgtggaaaagatcagcttaaaagaccaacacggtcgcaggatgcgtccgaagcgaagcaagacttacttatacagcttgcgtacctatccatagtgttagccaagatctctcacagccatagcggacgactaacaaaatcactggagttcccagcgggggcgggattggaagaggtctggccaccgtccatgctgggctagacgggtcgcgaccggtcgaacaggcaggtctggctggtttcgtcccaacgcggataatgtcaggtctaatggcagttcacatccaacagcggaaaacaagtagaggggatagaaagccagacctgtcggagggtgggagaagggaaaaaatgaaataataacgggggtacggtcagttactttagcggtagagccaagtaccaaagttactgtggaggtactgccttggtacattcaatggactgcgatgtttcagaacgcaccgtgggcttcaattgtgtagggctgctctttttgtttgtattatattattctccagcttctatttccccatgcaaggaggttgaatgctcccagcacccaggaaccaacgaggggcagaattccagcaggtcacaccgaacagagagaggtaccagccaggtattgtatacaagttcgtgggaaaaaataaaaacttcaccagatcctattcgctatcaaaagagacatgcagcatgaattatgggctgtcagtgcgcacgagatggaggggaaagcaattcccccaatgatgtctttatatgcgcttgatatcggtgatcagccctgtcatcgtgtcactgtctctcccacttttaagattaagattaaagatattggatatgctgaatcttatgaatatgcgatgctattacgagtctccaccgcagaacaagaactaccccataagactttgctacgtggttatggctaaagccaccgaagcacctcgtactccatagtccatagtctagatgctggtgaacagcccaacgcacgagtttgcaccgtagcacattgtcgtaaaagcgcaaaatcacctccatcacctgagcctcgcgagtcaatcccatcttcacgcttgctgtgttgaattacaacgtcgaagatgactgcatccttcagcaggggtgttatgatccaccgtgtgacggagcaaggatccactgcgtcatggcggaataggatgcgacttcatatcatccgattcgaaggtagctagtccgccttgttcttaaaaagtgcttctgataagtgacagctcatataggaggtacctgcggtatagcctccgcaggtcgcactggtatccacaaggtcagtgtctgtgccgatatcgatgatgtgcattaaataagaagtaaggacgatagctaggatggaaataaacaagcaaaagcatagacatagacatacatacatatcacataggctaaagagagttcctaaaaatacatgcaacggccatgacgaaatccaagctcgacataccgcccttccaaggttgctcttctccgcattattccaaacacttcttcttctcattccttggtccaatatataacttcaatcccatcctaactcaattaatcccaccatgttcgcccgccgtatcgcaaccaacgtccctcgcgttcgcgcgcaagcttccctcttccacagcaccgcgcccgcgttcgtgcaaaagggcgacgccatccctaacctggacgtcctggtcgagaactcccccggtaacaaggtcaatttggccaaggagatcaagaacaaggctgtcatcattggcactccagctgccttcagtatgtgaactctctactgtgatagataggatccggactgacattcttaaggccctgcgtgttcaagcacccacgttcccggcttcatcaaccaccccaagctcaaggaggccggtcaggtttttgtcatctcggtcaatgaccccttcgtgtaagctatacatgtcgaattgcagcgcggaagcgtgggaacatttgttgacgcaactatcatataggaccaaggcttgggctgcttcccttgatccttccggcaagagcggtgtaagttgccattctttgatgtatttttatcctagcaagctgacattgtatttcaacagatccgcttcctgggtgacccctccggcaagttcaacaaggcgctcgacctcctcttcgacagcagcgccatattcggcaacgaccgcagcaagcgctacgttcttctcgtcgagaatggaaaggtcaaggaggctttcgtcgagccggacaacaccggtctccaaggtacgctttcttctatcgagggtgtcgttctatgctaacatcacacagtctccactgccgagaaggtgctcggttaaagccactaaatagagctgcaatctccttgcaaatagtacaagaccaatatagcatgcggcacaaagtttattttaatccttgctgcacggcactttgtagcgcaggattttaatgtacaaatattccatcctttccaacccggccaacgcctgaaccgatgccagaattaaataggcaagcctgtagttgaatcaatcgagcaattaagaatcaatgccgattcgttcctgaacaatcttcggtctggtacaatttcttccatatccctctgggacgagtccatagtccatcatatccccaccctagaccaattactgctgcagagcctgccactgctcgggggtatagcacttgggagtccaagcatgaatagcagcgatctcggccttgagcgcggaattgacgagccggtgtcgcgcaagcatagtcttgctctcgaactgaggtgaaacaatcacagcctggaaagcctgtccacagccacctaaatcaacccaaaaagacagcacgtcagcgggagatcaacggagccaaaaaaaatatttcgacgtcatagcgccgttctcattctaaacttcaatttaaatttcaatttccatacccgatagatcctcaacctcgacatgctgcgcctgcagcgcttcagtcaacttgttcttcagcgagtcggtggtgattccagatgtgtcggccatagcggcgttgaaggcggcgtaggagcgcgcggtgagggaaaatgaagaccgctggatattgtgagggcggagaagatagcggcagcttctgctcaggacggtcaaggaggatgtgcgggagaacatgaagtatatggtcggggaggagaggcgagagaagacgagagagggggataaagtgccaaacccgaggttatcgcgaagtatgggagttgtcgctcaggtgctcttagtattacaaattcagagcctccggtcggctgtggctggtgggttcacgtgtgtggctcattctcgttttctgctcttcttcggtctgcaaccctcgcttggaacatccatctatgaattttcttcgtgctacacgtcgatactctgccatgtctatgctgaaatatacagaatgctcgccattcaccaatgttgtggtgagcgctatgagaaagctgtaattcaccccccgcttaatccccaagctccccgcattgcatggagagcttcatttaacctctgatatgtagatacccagaggcattggcagacaagagcttcgataatacaggatgcaagttgctattattttcaaatatcagttgattggcttctgcaatggactaacacgctcaatgacagtgctgctcgaagctcctttcgacaaatcccggatacagaaaaactcggtcctcctcactattgacctcactaaggccgtagccgatgaagccattaaaaaccaaaactcggttatcgtcgcataccgtaagacgcatccaagctagcatactagcgattggaccccaaacctaacacaacaccaacaacacacagacccaatcatcttccgcggcctgaaatccctcaccctcgccgactcccaacaaagatccctcctccacctagcccaacatggcatcagcgtctactccccccacacagcagtcgacaccgtccccggcggcatggccgactggctctgcgacgtagtaacaggcaacttcgaacctacagccacacctaacgccaacatcgaaaccagcctctcaagcctgtacaccgccccaacctacccagactcacccatccccgccgttcgcgggccctcctcgcgagcgctcccgcacaccatgaccacaatccacccatccccgcccgctacaatcccagaaggcttcgagtcagccggtgccggccgtctggtgacattcgccgagaaacagcccctcactgaactgatcgacaatatcgcgcgtggaatcggcctgccgggcggtatccccatcgccatcccgcagggccagtcggttgatgctatctccgtccgcacagtgggcatgtgtccgggctcgggctcgggcgtgctcctcaagggaggcgaactccctgatctcctgctgacgggtgagatgagccaccatgaggctttggctgtcacggaacgtgggtctgtggttatctcgctttcgcatactaactccgagcgtgggtatctgcgttcagtgatgcagcctaagttgctagtcgaagttaagaagcagtgggaggatgctatctcagaatctatctgggctattcaagctagtaaaaccttgggtgaggctccatcggcggctgcagtccagattcgggagatttatagacgggaggaagttgcggttcatgttagtgatgctgatcgtgatccctatggtattatgattttgcgcggtaactaggcgggctcttctgtttcgacatctaacaatactacaaaacgaaaagcgcaaaatatagtcacaattagagacattactcaacacactagggctagatctatgcagtacgagggagtctggtaatatgtcaagaaagtggttgaaatgagaaggatatcctagtggtagacaatgacagaaacaaaaaaaaaggtgtcttgaggcaagagagaacacaagacaagatgaaggacccaggtcaaacatcgaagaaatgcaggctaccgaggacatgaaaaagaaagcgtaggtctttcagttaagccttccgttcatggcttcaactagcccactattcacggatgtagggagattgtagtgagtatcgagcaacgataggtatagaaatgaaggaaaggaaaaaaatgagaccgggtaagaaccagacgaccgagccccgaatgaccgaatgacagaagaaacagaaagaaaaatgagataaatggtatccgcgtgagtggccttgtcaggaatgaatcaagaaagaagaggtccacgagatagtgactacagatcaatcaggctgccgccaccgcgctgttgctgttgctgacctgcccaggggttgttattggcaggttgctgctggaaaccggtctgctgcggcatgcctgtgaattgttggccgaagaatgggtttcccgtaggagcagcgtgtaggcggtccaagcccaggccggcagaattgacgaatgtgccaggtgttgtgtgctgtgcggggattcgaaggtctccgacatttccgaaggtatcctggccttcgcctgacccaagaagggcgttgagacgagcgtggtgagggttgagtggcgacgtactctttggtggctgtggggcttggaagccggcgatcgggttgggctgagagggttgggcgaacagcgaactttgaccatactgcgagttgttctgcgcaaactgattggttgcacggtcctccgacaaggaattgagtgttggcgggcctgtttttgcatggttgttgaattgtgtttgagtgcgctgagcgaatgggttgtttgatcctgtcggcatgggcttgagggcatcagcgggctgcagttgctgagagtggctgccggcccatgggttattgctccctgccgtctgatagttctcctggggctgttgttgttgttgctgctgctgctgctgctgctgctgctgctgctgggagaagacatccgcaccgtaagggttattcgggttaaatgcggtgtgctgaggttggagagtggcctgcggttgtaaaagattgttctgttgctggccgtaagggttctgatcaaaggccgagggctgcgtctgatagccattggcgtaagggttattcatgccggtgggctgattctggaatcctgtcggctgcgcatactggttgttcaggtagccagttgacagaggctgctgcgcattgatcgggttgccgaaccagtccacagcaccttgctgttggtagccctggttgtagccggttggctggacttgagctggggctggggtgtcgtcgaagagagattgcgcgttgctctcctccaattcgcgctttcggaggtcctcctcttccctgctgagcttgatggccttggcaagagcctcgtcgtcctgacccgccattgtctccttagcccgtcgcctgcgctcatcctcagcttcggccttgctggcttcaatagctaagtggtattcgatgtcggagtcgtcgtccccgttgcgtcggcgtcgctctctgcgcggcggttccacgggggagtttccgtatccttcgtcgagtccgctcacgcgagtcttccagagtttgcgatccgatcgttcactgcgcaaacgatcttcatccagtaccagtgcagttaattcctttgctgccacgcgaactacataacaccaatctgtcaattttgcgacatctctggttttcaaggaccaacttaccgttttggccaacatcccttgcttcctcgtcgacgtatgtgaactcgcgcaaagtcttgataatatagacgtttttccgggcccacgttactaccaactccgagccttcgtggagacaatagtccaagaccttcagcgacttcagcacgtggcgccagttcttgcccttatcgttgagtcgcttgtcaagcatgtccatgatttcgtagaactcgttcgggctattatgcaaatggcattagcgacgttcacacagttggtcgcagacacaaactcacctcccgaaagtcatggcggcgatctcggacatctcggtacccgtagggccccaggggtcattactagtggcttgaaaagtaagttagcgacttggtcacaatgtatgcgaaatgcatgggcgcattgcagcaagcaacccccgcaaaaaagacaggggcaagcgacaacagcggttctgcaacatgcggccagaactcgataatcggcgaaaaatgcgatgtaaagaatgtcataccatttcggaccttgacctgcactgaggaatatccttttgtgacgtttttaacgcttcgtacgactttagacatggtggcggtgatgcgacggtcgcaagtttaaggtggatagaatggatcgtaatcggtcggaaatcgatgcgagcagagtactagattgccaagcacacacagcctctttctcgtgtcgcggcccaagatggttgttaagcgtgttactcctctgaaagggacaggttggtctatcggtccaaaggggtcaggggtttgagctttgaagctaaaagaaagattggcaaacaatagtggatcgtcaactgatgaaagatgtaaagtgaaagagaggagaggggatggctcgaacggggggaatcagagggcttggcagtgacgaagcagtttggaccaaacttatactgccattgtttaagatctacacttggaatttcaggcttgaaggtttcttagttcatttatcatcataagaagccctggaatataagaaaaataagttccaataccacttgaacggtctaacatgtatagtgtatgtataactacgtcgccctcgtggccggaggtccggtctaatcgccgtcatcttactttttctcctttttcccctatatatagcccagaataagcaattatttatctgacctctacatattgatcttgcttaacatattctatcggattatgccaattttggctccaaagctatgtagatataaaaaaaatggcatgtttcccgccacatgtggcggtctgtaggcgagaaactggtcaggcaacagtcaagtagaaattacaagatactattggtacaacggtcatatacattttagtagtatgtattgcccattgttgtatattaaagtctcgcacggaagaaccgggctacgtcattgctgttctagaatagtacaacgctccgataggtccacattggaccctgtcatgtgatacataccccggaagaaaccaagtctgtctgtaagagactcaagagagaaaaatctggggatctagggagatctacggtaatagaagaggcaacatatacctggccagcacaagagacctttgtttacgcgcttgagaggtatgacgtcgcgttgtaaccatctgcgaggacctcgtctggaatccatggtatcactccctcatacggattttaagaaatctatcgccccaagacgagaatggatgcattcaggtctccctgtagattcctacattacatccaggaacagcttgtactctagtctaggagttcaactcggctacgctcatgtattccgtgggactcgtcaagtggcaatgagagccacgacttcaggaacgtccacgagaaagcccggttttttgtttgatgcagacctacatggacctcataacaatggtaatgttatgatccctgtggtaggtgaagcagcatatgctacggcacactctgccgacgctgtctcgtgggctacggtgagatggtggtcagagagatggagaggagagaagaagaagagaagaatagaaatggggggaggggctcttttatacacccaacaaaccgtaccttccctgtcatgtcattgtcacatgcccaccttcttgtttacattgtttacacaggaaggagccctgaagccaatgtcgcattatgttaattccttatagtgcaattgaagtcctagaatgctatcctctagctatcccatcagacagagcaccagcaatactctcaataaaccctttcttctgcatcccatcgacccattcactaggtatagtgtcaaacccatagaaagagcctgcaagacctccataaacagcccctgcagtatccgagtcaccacccagattgacaactgccaacgccccatccttccaagtatcatacttgaagaatgcccacagggcacactcaatggtatcaataacccatccactactcgtcatatcacgaggctcctttgatttccagtcgctgatagttccgtatctagatggcgacaagcgctccttcagaccagcatgagtaaatgggaactcagagaccgcttgatagagctgctccttcgtctgacctatacccaatgtatatcagcgggtattcttcaaagaaaacatcaccaagaaaccaaccattcataaccctacacaccaactccgtgtacgcctcacaggcctccacacacgcgagcgaaggatgggtaatccgactatgcgttctagcaatctccctcgccagtcccgaatcccgccagtaaaccaacccaatcgggacgatcctcatcaagctcccgttcccagagaactcatcgtgatccaatttgctattgaccaacgcctgggccacgtcgagttcacctttgtctatgccacgcttcgaccacagcttcagcgaggtgcgggtggagcgtcctacgtcccatgagcggttgattgtgctgaattggcctttggtcagccatgcgacaaagttgtggattgctagcgtgtggttgtattgcatttgggacttgttgaatgagcatgctagggctagtgttagagacccgtcgtccgaataggatcttgtttatgttagctacgaggtatttcctgtagttagatggtatggctgggatgggaactgaccccgctggttgtttccaggatcttaggcatgtgatcggctcgaatgttcctgcggctttgaattggacggggccaccgagggcgtcggctacgcagacaccccagatggcgccttgggcgcgagatttcgatgatagagacatgttgtaataatgtgataatgtgatgttgtgatattatgatgttgttatgtttttcttgcggggtgatttcgtttctaaatactagcagggaagatccttggaaagtcagagtcatcaggacgcactataggtaaaaccgtggcagaacctcaataataacatggaaacttaaatataaagccgtgactcaatatgagtcttgggagatgcgttgtatggagtacggagcctcattctaggtgggcctgactcacctcggatacgaagcggtctatgttgtatattatctgtaatattgggacctgtgaattactatatgcggttagttttgcctctttgagtttagcgccccaatacgctgtcacgtgacctaccttcaatgccgccgacataaagacactgaggtggatctcaagacatgctaccaataactggtgtatttctcgttctgacaaactctgtcggattaaccgtatccgtaaatgtatgcgtccaatcaatggtttcaatcagtctgtatttctgtactggctcagctgacaatttatggagcctgattacataaactaaaacataaacaatgcacattctcaggatcaatagatcctccggtatccttcggtatacttactgacatgcgtgaccacaggtcatgtgggcccgcctgagagttcagtagggttagcagcctgaggccacccgccaagagttcttatgtgccttaagggtttcagtaccttaccacttccctcaacttacccacttctctcttaccagtaccatactacttttttattagttacataaccaccaacattacttgtcatataactaccgctctcatggtgaagtacgcgatgcatgtaagtataaccctatgagatgatatgaaaaggccccagaaaagatggaaatacgatagattgaagatgaaactaacagttattcgcattcagactgcataccgatggtactgcaccctgaaatcgagggagggtatagatctccctcaactaaacgatcccaatgtgagcatactatttatctactaataaaatgaataaaactaatagagaatagacacagggggaaatcgatctattcctcggcgagcgcttttgtcgttatgccaactgcccgaaagatgtgggttttctttgacatttccttcatttctttgttaaagtactagtaaaaaactaatactaatttaccttacagactcctgctacgtctaccaacaatctcaggaagcattatgcagacaagcatactgatatgaaattggcgagttcgggtggtcgtccaactttacaggatgagcatgatgccgttggtatggtattcttctactacttttttactagtattctgacctctaatagagttctacattgcgatccgggatgagtatgacgcgaatgttgctgctatagtacaagtgaagcctgagcttcctcgtaaggcagatggcactgtgagttacttctaatttactagttttgattatatactaatattggaatagcttcaccttaccaatatgcgtaaggtatctaaggagcttggtggtcaggttccttgtgagccgtgtaaggatgcaaatgatcgtcaaggtaagatattatcaagaaatgtatctttttactacttattaactagtattaggttgttgccgtgaagctaatgctgaccggtgtgataattttgagctgtttgtaactagtgctgtagaggaggatgaggaacaggataacgaagagggagacgaaatggaagagggagaggaaatggaagagtgatactactagccttcctttctttactggtgaagaactagtattttcctactttggctgctattggtggagttcctgcgaaaggttgttattatgcttatcctgctttttactagtgtttctctgtataaaaaataaaaaaaacatggcgtttgccataaccctatagtgaaaagtagtataaaactggtaaattgaagatattaaacattattgtatatgaagtaaccctatcgcaaccctatctctagagagtattttccctttcccgtagtactaactgtctctcttgttgtttaagatcctccctcaattttttaacctttttcctctgatcttctaaactctcaatgctattctcatcctggctgttattgccagtgttgactgacgtagtatgccgaagattagatacagcgggtgtgctatcaatagtcagtaattagtatcatactagtaaagagtacatacattgcacgacttgttgaacgaccttgtgagctgcttgctccacggccgcgtttagcctttttggatcctgcccgaggaattgaatgattgcctgaagagttaaactcataaagctctttatcctcaggggccacatcatcatctaggacttggtaacgtttccgtcgcagagattctaattattattagttagatgccagtaaataagtagtaaatatacataccctctcgctgtatactcttactaaaccgtgtctgcatatcatctgtatgataggaatgtctgatatcgaaagcttcacggctatggtattgctgtacgtcggtttcgtcgaggatctttgacctaaatgaatgtaagtaaatggtagaataccagtaaataattaatattcactcacttcgtgactgtaccaaggagcgtatcctgtgtacccatatgataggatttatagtggctttgctctactgcatttgtatgctttcgcgcttcctcgaagaacatagagtctattggcgagcatgcattacaaagcccagctgcaataacatcgatcttcttatgctcagcccaacccttaagctcagggttatgcgctataaatattagtaaaatactagttttttcaaatggaaatatataccgataataaggtcagccaactcctaataattctgtcgacttttacagtccattaagctggctagtcgacttcttccctctatatgtgagagatcttctgggtcccggcttgctggcaccaatttgttaattgtacgtatgaagtgtatcttacagaagataagaacattcatagtatgccatctccaaccaagatcccggttattggttttctggtcagtctcctggagcatttttccaagccctaatactagtaagttactgtaataatagtagtaaaaggtataatacttacctgtcatttgttttgggcacatatcagtgataatagaccttattccactaccatgtagatagtggaacttgatcttcttacctatacagcgctcgacgagattaaagacatttccaaatataaaatgatacgcttttgtagtctcctgatctgtgaaaactcggaatagcgtcataactagaagatattagctttggatactgatataatagtagtaaaacaaactttttccatgctttgggacaaatgttgcgaagataacctcgttaaaaacgcctttcactcgcttatatgacatatcaacttcgaatgaatgtaatgaagcaaggatctcgagctgttcattaagggcacaaaatataaaggcacctttttcattatacacaatctcgcgtacatagagctaaaggataattagcatagtagtaataatatactagtaaaacgcacctttatagccggatttttctccatctcgaagtaaacacctactaaatgtctacccattggatagtcaattgctctcctttttgtaaggaccacagaaaatcgctctttatttgcaaagctctggtatagttcagacagggtttgagcgccgtatctggcggcgaggtctcgaaccccatcactccgaagaaacgcgcctatagatactaattagtatctaataaaatagtattataatactagtaaggttacttactaagtgtaagatccgatgtttgtccccgagataagagattccaaagctcttctataaggtcgtatggtggcttactcggtggcgggggcgggtggttatgtatccctgcagagtaaaagatagcatatggatgcttctctatatcctttggcacaaatgtacggaatttaactgtgcattgtgggaattgtctctggatcgcaccgcgtccgcctaggtgcacaacatctataaaactagttagtcaataataatatactagtaatatgaattcataccgcaaaattgggctcgtgagctagtttggtagattgcagtgtatacttctgtggtaacttccctctgttccttttgaagaagactaatcagaagccctatatctagcctgttccgctttgtatataatgttgtaaagtaatgattcgtgtggttactagctgagccgttagaacaacgaacgaatggcaattcctctcctactacattctagttattagaggctatatattagtaaagatatagtaaaaagaataagaacgaatttacttacctggtggttgaattttccgtagaccatttcgcaggtagcgtctgcttttttacaagcttttctctccaaaaatttctgtcgaagagcatcgtagaaactaaatagttgttagctactaataaaatattagtaaaataggtcgcatacgctaccgcttcacgttagggttgcgaatattggtatgactgtcgagcatccctctttatagagaacatacgccctacaagctcttcattaacctctgtatgggagaggttacggagatagtcgttaagatgaacacagtgcttcatgccggaatagtaagatgctgtcttcgtgacttggcaaccaaggaaggagcagtaaatatcactttttccgccatcacgcctactagcgtactggacctagtaaaatagttaataactagtataatatcgatgattatataacaacttactagattaagtgcatttttcttctcttatgaagagagatgtcggagattaaccacatatgcatagcctttcggatgagtacgcggatattctggaaggagaggtacatattcaatctctgtagtagatattgcgtcgtgggtagcttctgttaggggagttggttcatcttccgttccctatttgaaaaatattagtaacaaaccagtaggaaactagtaaatttcttcaaaaacatacctcgtattcgttgcgctcatgcaggatccgatcatcggatgcattgtaaagctcgacatctgcctctgcaggctcgtctggttcaggaataggctcggcctttataagctcttcaagcttatgatagcggtgtttccaccaggtagattgataatgcgccatggtaactactagtaaacgaattggaacaatggtttgtaagtagttatacgtgcatatccaaagatatatatattcgatgtagagttatttatcagtaattaggtagtaaacaactagtaaataactagtatacaagaatgtatcccttgtaaacataccacatatttcataccaaaacgggatgatctaatcaaagataccgtacatttccagaccaaacagcatttacataagcctaaactaggggtatcgacgtgagcattgaccgcctgaccaacgtgaggtctcaggcgggcccacacgacctgatctctcctgacatgctccgacaaactcttactgccttaggcataaaatcccaaaaaggcttagtaccactaaggtcgcaccccacaatattttaactggaccgaaccactttccctttctctatcatacttctatcctcagtgatagattaccatctactttctacttcatcatggctgagcagcttgctgagcagattgctgctgatgatcaccacatcttgtctgaattcgaagacccagaacgaaaagccctcattgcgcgatttgttgagagtgatcccacgagattgagtgaggtaccactacgtaactatctcgctttgtggttctcagatatccaggttcttcgcgggttggtgtctccccataataccaacgaggcttttgagcgcttgggtgtcttcaaggctaccgtgaagtcaatgaacatctacgatgtagctgggacttgtaagtacccccagaaaacgtgcaccatgacaccaaactaaccggaactgcttcatataggggctggaaaaacacaggctaacaagactggcgacaaatctcacatcagctccgtctattcatcttcttccgctgctacgcccgcttctcctcctctagcgacggttcgttccaacgtgctctcaacgcacggaaccactgggagctcaacgccaagggtcccgatatttcggccccgtggctcggtctccccagctggtactttgccgcagcgcgaggcagaccctaggtttaaagtatgtttttcaaggagatcaaagaggaaacaaaactgatctcatcgatttttagagcttagaacgggataataaacaatgtgtgttaaccaagcgtggccagcctaccatacaaacagcacacattgtacccaacaagctgaatcaaacaaccaaccgtcaccttaccaagcaggattgttgggcgtggcttgatgcattctggggtaaagaccgtgttgatcaatggaaggcacagctgctgacaggggatgtgatcggaactgagcgagtgtcgaatttgatcacccttgaaatgcaaacccatgaatattgggaccgcgcctcgatcgcattccgtcctgtgtgggttaatgctacaaatacagagatgcatatcgcattccactggcttccgtttgtcaaagatggaccattggcaattcacatcaagcagaccgagcttgtaccgacccaggagcacatctttagcgacccatactataaacctcgtatgggccctgggatgaataacatgcttttccatacggagacactcaagccgatcgtctctggctatgttttcaagatgtccaccaccaacgcaaaggagcggccactgccgtcgatggaactactgcaactgaagtggaacttgtcccgcatcgctgcgatgcagggggctgccgaggacgaagacagcgattacgagtccgacggaggctctgttgccgttcccgcaggtcctagaacgccagttagaggacggcgcatgtctgatgagaataggccacccttccgttcctctatccaatcattgtctccatcaaagttgcagaatctgtcgttggaggatgacaacacatccagctacctcgttgagtaacgagttcctttttcttgctgttgtatctttgacgatgccacgactcctgaatagggctgacttggtgagagggttcggcttcttctgttccttttaacaatcatactatttttaccattttagacccgaaattcattcaaggtctatagaagggcatcttcatattattacgtgtcgaattgttttacaccacagcttaccacccctaagccgatggccaatcagagagaacgaaccaaaccatcgaaataacaattcgacattggtacgcacaacaaactctccaagccgacccagacgacgagaaaccgaccagcaattaggccaaagccctaccattcttacaagccacgcttaactcttccgccaatacctacctatccctcaaaatcttctctttcctcttcatacaacttcctttatttaaacaaaacacactgcaacatgcctactaaacgcaaaaactcactggccgacgacgataccaggccagtcagcaaaaggacgaagccgggcttaagggctcacgctaaacagctaatggacctcatgactgaaactgatatggcttacacaaccgcggacgaagacaagtatacccaggtgatagaatggtcgcagagagaagccgataaaagactcgacgccgacgccgactatactgaacgcgcaatatagagcccaggcgaagaacccccgactaactttggcaaagtcctgaccgcggctgagatggcagaagcaccactttgtatccaaaacgagatcgacaaaaacggcgaatgggttccgccaccacgcggtgtgaagctgagtgacgaaggtgtctatctggccgtcaaaaacatgtctgctgtagagcgcggagaaagattcccagtcgacttcgacaaaaatggacacgtccgagctacatgtatcccagaagaccctgcaccactcggttgggcacacgacctacctatgataatggtggcacaaggaataatcccactcgttggacaactgcatgccagaaagctgggcaacctcaccttgaaaaccgacgccaatatcaaaaactccccggctttcacggtcggcccagtggtcgcatcgaaatccgttgttgaaatgagcagatcgatccagcgccaatatgtgacccacaagcccgaccgggggtacaaaatggagtacaacttggataccgcagttgacgtggtctccaatgaccaccaggacatggcaatcctcctaggtgactgtcacactggcgcccaaagccgtctaccttccagccgacctttcaagttataaaactctatcaccgcacagagaacgttacatttgttctgagggtcgcgtaggtagaagagtttaatgtcgcagtagcagaccgagtccagaagctctgttacgggtatgtgcttcggaagatcactctgaaaagtgggattttgtttacacttgctcagagaggagtcgttaggtagggaggtattctgtggaagtaagataccgggtcgggtcctagtaatagctgacctgagttggatggtagtaaattggacatttatactcctgtgataaaaaaaccgcgaatatacccaatgataccgatagatcacacaaaagacatctatatctagagtattcttatctttcgttcgtctagaaattttgcgcttagccgggaatttgctattaagaaactatgctctacttagctcaatcccctttagaatagaaagagcaactgtacgcgttgtatctgcttataaatatcgttactaacactacggcgggcgaatagcttaaagtattgataaaggcggcgccagtattcgtcgtatgattgaagtgctttctttcgcgatgtcttaaacatccagtcaaaaaagttcacataaatcgcttggtcttccagcagaagatagtccacgtagttatggttcgattgaatgtaatatctattccggtattagtgcccagccctaaggctttcatttcatcaagattaaacccacttccgccagtaccgttcgaccacggcgattcctatcagtgttcttggcttgaagtttggaggaagccatccgagactgcggaaatgctgcaatctggcttacgtttcctcgcaaaggattggatcggtccagaactggtgatcaacttgagctggaggggcggatacagtcgccatagggagaattaagagacaaaggtcaaggtttcgattctatgataggagtcttgagaattaggtgtatagaggtcgatcgaggcagcggaggtgggatgggaaggttgttgaaagagccaccggggggagggcaaacgaagtatcttatagcagctcgaccaggctgggcaaaaatgaaggcggcctggatttgtatgcagaggggagccattttcggcgtctttttggtcgccagtagaaacagtggggggcttacagctgatcgaatgttagaatgggaccgctaatttagcgtgaaggaaaatatattaatccgtgttaatccgcgtttcgaccatctatctgctcagaggggtcttagcgaatgtcgagatctctctttatactaggatgtcttcatagcttataatagacgttcataaagaccccatgatcattatttacagtattatctttaccactaaatcctatcttcttctgtactagggtattataacccctaaaagaatcccgacattcgctgatgtctgacattcgccgagctctcggaattcggattaatacatgttcctctgggccaagaggcgctaaaaattagcggtcccattctaacattcgaccagctgtcggtcgcaagggactaccactaaatcctatcttcttctgtactagggtattataacccctaaaagaatcccgacattcgctgatatctgacattcgccgagctctcggaattcggattaatacatgttcctctgggccaagaggcgctaaaaattagcggtcccattctaacattcgaccagctgtcggtcgcagcgggcggtcaggcggcgactcgccgtctaagttaccggtggaaaggcggccgtttctggcaccagaggcggtcattttcggcgtcgttttcacaggtctttatattctagatgtaaatgaacaaggcagtgcacccatgcccagatattaactgcacatctaattatctttgcgtcattggcaggccaaacaatcatccggaccacaaatgtatagatcttttatgctatgcaacataaaaacgggcggtgaagcccagttccgaatgaaaattaggggtttgggagtatatatcagagtgacatgggataaattgggtatggttttatgaaaatcacataaaaccgaattccaatccgattattgccagcgatagagagtctgtggccagaatgatgttcccagatcgacgcttctgctaacaagaaaaacataaccaatttgcttgtgcttttattcttatctccaagtccattatttctccatgcttaggtacttcgcctcggcgcccttgatgcacgcaatgttggcaccgagcttgttgatcgtctcaatgtactcatcataggggtccgagtcgaagacaataccaccaccagcctggaggtacgccacgccgttcttgaccatcatagtgcgcagcgcaatacatgtgtccatcgcaccgggcatctcggcggagccatcttcgttcgcgctgttatatccaaagtatccaacggcaccagcgtagacgccgcgcttttcaccctccagctcggcgatgagctgcatggcgcgcaccttgggtgcgccggagactgtaccagcagggaagatagaccggaatgcatcgaatcgggtcataccgggtcgcaatacccccgaaacttgagagaccaggtgctggacgtgtgagaacttctccacgaccatcagtcggtcgacctgtgttgttgtggggtcgcagacccggttcacgtcgttgcgggctagatcgaccagcatgacgtgctcggcacggtccttgagactgctgcggagctcctcggagagggcggcatcctcctccggggtcttgccgcgcttcactgtacctgcgatggggtggctgatgatacgcccccgctcttcctttaccaggagctcggggctggctccgacaagctggaagtcttgacagtcaatgtagaacaaataaggggaagggttgacagtgcgaaggtggcggaagaggttgaatgggtggagagaggtgggccgtgatagccgctgtgacgggacggtctggaagatatcgcccttggcgatgtgctgcttcaatcggttgacgtgaccttcatatccctcctgtccgatgttggatgtatactcctgattcggaatgatcgggccctggggcggaagtggtgtgcggtcctggagtagcttctcaattgtcttctggatgatggactggcccttgagatatgcggcctcgatatcggcatccgccgagggaatgggaacgtaggtgataactttgacgacttggaagaaatgatcgaatgcaatgatggtgtcgtaaagcataaagaacgattccggcactccgaggacatccttgagcggccgcgccgtcttgggctcaaagtatctaacacagtcgtatccaacatatccgatcgctccggcggtcaacggcggaaggaccaacccaggtactgtcgcgacgcggaactgagaaagctcatcctcgaggtatgggaggggatctgctgctgggccatggccctcgccggtcttgatgacctttctggggtctgtatgggaggaagtggtaagcgacggaatcggaccaaagactcccgatatcacccacctgcgccaacaaaactatatcgtccaatggtctctgtggtagcagcactttcaaacaagaatgacaaccgcgagctatcgctgcgagtcagcgattttgtccagcatcccatgtccccgccttatcgcgaatgttggaaagaaccccatgactcacttctctgcaatcttcaagtatgccaatgtcggggttagaaggtcggcagcaatcgaagccgtgacaggaagtaggttgggagggtactcggagttcctcgactttgagataacttctcgcgccgtctcgagggacggaatggtggcgatctgactcattggtcaatgagcggaaacaaaatctcgggggtgtcgaacagtggagaaatccagtggcaagacggacgtgtacttacagcagttgccatgttgttataagtggctgatatcgacgatgctagtcaagagaaaggattgaatgggcggtgggaaaatgattcactgtgggtgggtacatgtatgtattgacggccgccgcgtgcaggaatgcgccccggcctgcatgtatcggattcgacctcggaggtttaacaagataagcaatggtgatataaattttaggcttcttatgtatgagttgaaaatcaaatctcgcgcgaccttgaaaggcttacacgtctcacaagtgtgccggcgtttggttatatgcagccaaaagcggactagcgtcgaggggtacatatcgattatcgataaaggcctagcgacatcgggactgtaggatgtacctatattgtaaatacaaacacttcattggagaatcggggtatttccttgattatcagacactaacagtgagttttagaaatcacagagcccacccgagatgggccatgggaaaaaaggcaaaagaaagagtccaccatcgccggtccatgtcattcgccgtgtccacccaaaccggtcccaagcaatgcatgccattatgcattttctaaagaaaaatgtatgttcacagaaggcaaaaagtaaaaaaagaaaatcgggaaaactatgaagggtgatatgtcttcgagggaaagagaaggcttttcgagcgggaatgtcggattagttcaagcagggcatgagtcgtgagttttacgtggctgtttcaaacccactctgtcatcgctgtaaattgatgattgccatcttcgagagtccgtcagcatggggagaattgatacaggtaaactagaccagggagcttacctgtttgtcgaagccataggcaagtcgttttccatctgcatcccaggaaagggcccgatgggggtctgattttgaatagccattctgttcatggtgtccattgtgtccattggtcatgcggtcggcttcctctttcttcacctcggggctagttgcggtccaggtagacataagattaccgccagtctgtttagtgttccagataaagagcccgtccttgctagcagcaccgagggcatatccatcgggggagaaagatccggtaacagcggggtttgagtccaggctcagctgatggatactcgtgtagtcctttgtatcgaggttgacatgccagaccttgaccttaccatccgccgagaaagaagcaaattcaatacgacgggagtcatattgagagctgatgtcaatgccggtgattctatccttgtgggcattggggataagaatgtcgtgggtaggtatccaaattgaagcactcagtccagaagccacgatagcaaccgaatgagactcggtttggacacaacgaataaattcccaagtcgcgttatctttgggagagggaaatgtcttgaccaagcggatgctgttgtccacttcgcattgatagactgcaccctcacctgaagcgaatgccagattgcgtccacaccatgcgagatcataaatatggttctcaattatttgaggttgcgggaaaacatctggtcggcggctgtcgtcccaaagcgcgagttccgatacgttatgatttgaggctacaacgatcagttgtgagctacccgctgcccagtgcaagcccgtgatcagccggggtacttcgggtagtaaatccacggcgtctccattgacgttgtacatggtgatagtgcccctgtcatcagtgcaagtcgcgacggccaatttatcaccaatggcatcccatgctacggtcgagacacttgtgtcacccctcttgagctcgaggattttcttctgcaccggttccgacgacattgacaacttccacaagctgcaaaagaggtcaccagctcccactaccacagtgggatcccgagggcgccaaacgacgtgggtcacgtgatggtccaaattcagcaaggcggtgtccggggtcaaatcgatgggcttggcgggggcgatctggatggaagagctctcgccgttttgcagagtgggcggtagttcgggaatctcctcggccatgctgacatcaccatcctcatccatatgatcgggggtatttggctgactttcagttcgcgccttgtcctccatggattcatcgctatcagtttcgtcctttcgggtgtcctttccggactcggcatggccgttcaccgggcggtcgcgcgcaagttgacccggcgaaactgggtctgtgccgaccgcctcatcgcgactttccgccgatccagttttagttccaatttcaaagggctctggtccgaaaaaaaaatcagacggtgaaaggcttttgtgattgccctcctgtgcatcgccattagtttgggtttcaattgaggaaaccagaaaaaagtaaattattttttccgtttggcgcgtaaggaccgttcaaattgaaacacataccttgtccaaggaggattccatttcgtgatattgcaggcccttctggaccagcgataccagcgcatgggttttaatgtaaggcgcaaacgggagagtctgcggatccgggaaccacgcgcgctgcaaagacacggcggcatcgccatggcctacgtcgagttagaggtcaattggacgggcaaagggggcaatgtgaccaaccggcttcttggaggtacctcgaaggatattagcgctgcaggagatgcatgggttatattgcacttacctccatattaaatagttgacgtgatgcgacgtgaggtcaggttgtgccatgattacatgtgcgactagctaagggccgcggacatgccagagagggaagagctgttttgccgatgaaaatcaaagtggaggcttcgatgcgcgagcttcaggaacacggaacacgaggccggaagggggtgggaacttccggataaacagaaaatgggctttgcttgtattttccgcaaagaatttgagacgtctgagtcttgaagatcgaaaagaaagccaagacaagggagaaattggagtttcggggagggggggtggggaatgaaactgaaagagtggagggaagaagaagtggaattgaggatcaaaaagaatagaggctattctgtaatctcctagaaatagaaaccgagtattcaaatcgagacgaaagagtgagagggagaggaaagtgaagatctgagattaaaggatccagaatgtttggcagaagtccatttaacacacactagccactttggatcctccctgtggcgtcgactctccacactttttttcgaacttctccttctctccagtcgtttttctattaaggtatatgacattgggtatctgcatgatatttaaacttgatcaaacacctctgctattccaacccttgaacttctacgacttcaaattactctcccgctaagcccctaaaaatggggttctccacatatcgggggatttcagcacgagcaccctttgcaggtacataggtacttgattgattccctcacttcttggcgttccctttccgatttagtgctcaaccctgccgctttttgctcggcgtcaagtcgtgccttcgacaattggacgaaaacattacccaaactggacactccacaccatggatccacgaagtctcatccatccgtcgtataaggaatctgtatcccccttcacactcatgcattggtcctatcctgctctcttatatatgatgcgctcggtcggaggaaagccgtcttcattaggggcatattcacattcatcggcaaattcatcctacacctcgttcaagctaccccaattgcttgtcggtcgtatcatcatcagtatgggcattggaacggtctttaccatggttccgtatggcactataaaagccaccaaccggggcaagaacgtcgtgatcgatggtatcttcattaccagtggcaattccatgctactggaacaattttggctcttctcatatcgaaggccagtccgtgtcatggatagttttcctagaaatccctgctgctctgtcccttgtcttgatcatttttatatttttcttccctggattacctcgccggctcgttttaattggccagggaaaacaatccgtaaaggaactaacttgaattagattgaaatcgatgtatcgaaaatccgacgcgagatctcatctgtcgatttttctccggaaaccgctcaagttgccgcttccttcgaagatatcttcaccatgcaggatggaagctattctaccgttctgtgctgtgtctcgacttgcaggtttaaactcaagtgaccggagtactttacagccgtctccaagcagaacctgggattttcgggacaattgccccgtatttcggagttcatcgcttcgttcgttgtattcttcgctattgaccatttttatcgacggaggctgttcctattttgtggaaatggcctcacgctttgcatgatatctatgaccatcattcccaacttctctagtaaaaaccacgcggcgtaggtggtcgacgcgtttttcccgttcatctttcatcgaggtacaaggttaatcaatccatagaacccgttgccttatggcataaccttaaacaatatttttggccatttcaacaatatacttaagacatgcattccttaggcaccaacccctccttcaatccccaaaccaccccgcgattcagagaagacatgccatgcgggccgaagtcaaacgtgcattccttcttacaatattcttattacaccttgaggcacgtattcgtcctgccaaacaaacacctcaatcaagatctagggcgagcaccccgtccttttgctgctcagacacaccttacgatgtccagagttcttgggcgagtatcccgagaccctcaaattgttagtgcacgcaggacagtacgtgcactggtcctcaatcaatcgtgcaacggaatgggcagtgtaatagctcagatcggtataagaaccgtgataaggaccaaccctgagattgcacgaactgtaagtgtaaattctccttatgttgccaatgttcgaccgcgactgggacatattctggagaagggaaaggcagctagacttgtacgcaaggttacccgtactgcatttaatgccgtatgtaacacgcttgttgaggctctcctgggcttcttcgggagtttgctgggcgatagtcgtgaagaggtcaatgatgtcggtgtgcgaatctgtcttgcttgtgttgccgtagaataagagggcattggcatatagctctggctcggagcttctgtagcccaatgcgtcttcctcgatactctgaagaacggtcaagtttgtgccctcgatgatgccggtgctgctgtccacatccccggaaatgtggtatctggcccacactgcgtcgccgaatcgtccctcctgtgtggcgttcacgtattcgcttgcccaaggctcgacgatagggaaccctcttgtgtcattttgaaccacctcgtcgatggtgaagtctagaaacagctgttcgacaagctcggtggtgctcagactcagagcaatagcggcccgttggtttagaagcagagttgcgaggaggtaaagcgaacgcatagtgacagggttgaaaaggtatgtgtatattcttttaagatgggatgatcaaacaaagaagaatgaggtttgaagtggggtggaaagaagtaaaccaaattcgggcagttatttgaatgttatttatacatttcctgcctcctcatctaattctgtatagcagcatatttaggtcaaaggtccctagacggctgattgttaggagcagatcagctgaggatggcagtagtgtatacatgtattcaggttacattgcatggcttatgcagtagaccccaatccttcgaacgcaatgctcaccttagaggcagtggcatcagatgtcaattggttgactgatgtacttttttttctgtttctgtctcattccttcaaaatacgaggaggatgccgcaggattccccaaaaatagggaaaactatcatattacataaaaagaaaatataacctgtgagatatcggatggagtaagtgggagagacactaccactataagcttaggctattggacagaagcctcacccccgcatggtagtgttggtcgagttgctaatgtagccatgtaaccatctgggcatattcaaagctaaaaagcgccgaggccatgtttttcgccaaatggtgggcatcatgcccccacaacaaagccgtgccgccctcttgcttactgtaagaaagccttataatgtcgatcatccaaacatatattttaaagaagacaaatgatcatgatcgaccggttaaactgggtcttggcattgcttagcggctttgagccacacaataacagaaccatttggccccagcacgtcgctccaggcttgacgttatgatatcatggggatccaaggcagaagcatttttgcgtccactctgagattgtaataaacgtatcgtgtcttacaaatgtaagaagacaggccttccgtttctcccaacgcgtctggtgactctgatcatcataatccaccccttgaaggtttaactctgtctggtatgccgctattccgcttcatgcatgcgcttcgccccgattgtgggccatgacaagcaacgggaaacgatgattccggactaaggatgacacggcagctttgcatttggagtcgatgacagtgtatgtagatcaagcacctgtgtacagccctttagaagaataattgatggtagaatatgacgagaagaacctggctcgatggtttctttctagaatccaagcagctcaatgagacgttcgttacatgacaattaaaattccaattcatcagctagaagctcagcacgatgttcagcccgggcttgagcccgtagctccttaatatcttgattgccaatgcgggtaaggaggtcaatcacatcacgatgtccatccgaggcactagtacgctcgtagacggacgagagcgcttctgcatagaggtctggatcgcccaccctgtaacccagtgcatcttcctcgatcatctgcagaacggtcttgtttgtgtcctcaattatgccatcatgcacaccaccatcgatatggtagcgtgcccacacagcgtcgccgaatctgcgttcccgtatagcgttcacgtattcgctagcccagggttctacgatcggaaatcccctggtatccttttgaagtacttcttgcacagtgaagtccaggaacagctgttccaccagctcagtctcgctgatactcatggctctctatcgaaaatatgttatttagatagtgttggtatgcaataaacttcggtgcaaatacctgggtattggcgtttctcttcaagccaagactcaaggtcaagtagagctgcagtagatcgatgaaatggaagatggaaatgatcggaaagtgagactgtcgcttccaaggttagtttattgtctgagtcagggcatactaggcagcagctcaggcaacaaacctcggaaggatcatcgaattaatgttacgggcccacagcggggcagggggtcttatgtaatactaaaggtactggcgctaagcctgaatgggattagtcggagataaaatcctacttaatattacataatcacggcaggaagcgaaccttaatggttatagaagtgggtctttcgacatacaacatacctaaattgcctcttacatattatgaatagtattactcggaagtgtgggcgtcatggcctattaggcactatagtgtgagaattgcggctagcagagtacatacctaaagtaatctagcggggattgtgttggtagcccttctcttactgtcagaagaaacaaacatgatggtcttataccaaagtgaatgacagttatgaaataagtcagccggaaataagagaagccattcctattcttatcatcacatggttatatcatcacgttactattcaattaaccgagcccatgtcgtggtttgtcttatttgtgaatagtggcataaaccgaccgccctcaggatacctataagaaggtggccctgcccccagaacttcctcttcttttctttcttcttcagctctctttgcctctggcttagatcaagtgtagtatctgttctattcagtttaatcgctgaatgttctgcattgcagaacgtcatgattattctaatatttggacctcgcgacttggcctctgtgcttgcacacacctcgttgcacagtgtcactgggcttacactacccccgatcgacgcgaactccttttcatcaactgttcggcttgtccgggcgattggagaagatctctgtttaggatctacgttcttggcaagagtgccgattaactcaccgcccttttgaagagtggatctgaaatactgccggtaaatattaaccaatgaaagggttataccccgatggcatacatactatgtactccgtaattcagatcggcagcgcatggtgtcagaatcttagccaggattgtaagcagagatcgtggatggatacttcagttgccgggcagggatacaaggagtttcctaaggtttgatactagcgggttctttgtcaaacagacagggaggaattgactgcaatgtcactttagtatctcaattcatatacaacaataaatgaactattggagtagtgaatcatcagccttttctacacatctaactttaagaaaatagtatagaagccaaagcagagttcattaagaatcagatatttaaaactcaaggcttggagtacaaggtggcaacttgcaagtacatcctttctgagcaactctacgggcgactaagtatggtattgtgtatgtctttttttgatgtcttttttggactcttttatactaccttccgaaagatctttatactgctttttgaaggccttaatcagctatataagtagctctttgtttgtttatagaatgcgacttcttctctcttttattctctctctgtttctcagccacgcatcacttttgatactactattatatggcttttatactcagtccctcgtttaactcccaatacaactatatattgcatacattttcgttgatactgaggcagaacttgccctcccagatgaagggattatcgacctagttcatgagtatatctcggatatcgaactagatcccgacatgagtgcaaactcctcgtcctatggtgaaaccatccttcggcgcaaatcatccccggatatgagccttgttcaactattaaaaccacaaactatgccactctcgaaaaatcggagggcttccattactcgccatattactaggccacgagatcgcccatatcttggaattccgctgtattcgtgcctgcaaattccacactgaagatgaaccttccgatacaccaccgggcattagctgcggtgaggctggcacggcctgggatctgaggtcctttggtggtcgtatttatccagtctgctagcctgacggtagtctatacaatattcggagcttatgtcccaagagcacctcttggaattttgacgcgatgaagatgaatgaaaattggcggaggcgcattggaagcagaagcagtcgttgaaagctccaattgacgcatttgctcgatttgcacttttggaggatgacctttttggaggaccaggtcattctttttgaattgatctatatctacttcggatatggaactcgagagggatggtttcagagaagattaaaaggaatcataccttgcggaggccagaaatcacttggtgcttcagttagaggcttggggaatatgcgtaatgtttcctagcaacatctatggatgctgtaattcaagccgtattgctagttgtaagcaccatgaaggtacatgggtccctcacttccagtatcttttgaccctgcagctaaatcttctaatcgtccacctcaaggcttccgaacttatgcttagacgattttcagattatccattcatctcccagagaattcgcagttaggttttttggtggtaccgtggggctcgtcgacgagtactggaatgaacggggctcgcaggcagcttaggattgggaatacattgaagatttgaagtccagttacattttcaatcgagaatagctcatacaatgaatgctagctgtgatattgctgcttccttggcgacgatgttaagactgtaacatccggcacatgatttacatcctgacaataattgcatgcgttctgtttgaaacaaccaaatctggccttcaacatgtcagccccaaaagtaaactcgtcaaggttttccataacccttgctagaagtagtccgaggcagcacccgacaagtaaaaactacagacactagtattgtaccaccctggtgaccagggatgggctgtcttcctgcttcgtctcaacagtggcagcagcggtaacagcggtaggatcttgtgccttaccgcgagagcaagcgctgcaagaaccagggcagagccaccggtggatcctccttagtacaaatgggcttgtcaatgggacacgagaatgttttattgtaaccggacagcttggggagtagtgcgacggctcatcaaacttgtcgagaaattcagagtcgatgttggctgtgtaaacgtaaagggtatcggccactattccagaatgggctaggacctgtaccttcttaggtttaataaatagtgcacctatccaagattgtgcagaacataccttgaaagaattcgctgtgttccgagccatttgctctgtacttagtgagcacgagtcagccgttctcgaatttgcactcgaggtgatatctgcatccacatgactcgtctgattctcgggtttgatttcggaatctgctccttgtgactcctgctgctgcgcacgccgttgcccctgggctagagcgatcagtatcgccacgatgtatgggtcttcgacgggattttggggttcaagaagtttcagctttttctcccagacacggaaaccgggttcgttgcttctatttcttttgcgaggtggcgtgtaggacacgtgcttctcgcgaagtaactgtattttaccgaacgtgatataggcaaggtttggagctacggagttgttcgtgaagacaccttccgttctgattcttgcaacagcccgacgattaaagtaaaactgcaggttatcagaactagaagcttgttagcagcaccatcaatgccgtgaaatacgggatatgttactctgaatattcaatatcataagtaccaagtatggttttaacagctgccttcttgacatccaaggcgaatctccctgccagatgatttgcactgatcatagcccgacgggatcgccctttcactggctttatctgcacagcatcatctgctgccctatctccatggaaaccaggatcttgcgatgcgggttgtgtttgtgggttttgcggcctcctctccttctggggccggaactggcacgtcaaaagtcgtagttggtttgaggtccatgctatcggccgtacatacaagcgtgtcccacagttatcacgaagaattgcctgaatcgaatctggttggggtaggcccctgactgtcgttggtgggtacatggtaagagactcgctttgggagggatgaggtcgctgcgctggaggactttcaatatcgtttccagcctttcgcttggatccaattattgaagaaggtaagtctgacatttcatcgagataattccctaggaatatgcgaatttggtgcagtggtagtggctgctgttgaatcaatgattttttgacgcgcgacgcgtaactaggtaactgtcaccctgcggaccgtcagccacaagccacagctccaggctccagccctaggctctagccccatccttgtatagtactacaggggtccaacaaacatccattatttacccctcagtaaccccctcacttttacttagcagtggcgtgaaggctcgaatgaccatcaaatttgagaaactaaatgtatattccacatctcgaacgttctttgagaaatgagctgacgcgatatctatcagcatgactaccccgatttataaagctcgaagccgagccgaatttggacgtctgtctaaggagcatgagggcttacggcttatttcgcagctcaagccaaaggaagtgatgcgttctgctagcagatggtcattccgacatttgcttggctttcgactgctcactctcccagaaaagccctttctggagggttttaaaactgatcacaagaatcactgcccagtgtgtaatactgaaagacagagttcccagaacgttgaccattattggacgaaacttctcacctcagattgtccaatcgactttcggaaaagcacggactctgagcttctacgcctaccaggtggttttttttgggtccaactcgcacgagtaacccgctcgcaagtcttcatagagccgcgggtatatcctcagcgcgaacgacgacctctaaaagcagacggttttgttaattctacatccgccattccagggtcctccccttccatgaagctcagttcatccgaatttgaggttgaccttgacgacctcgacgaggatgagcatgacgctcggcgaagtaaacccgaggaagtcaccgttcacttcttgatgtcgtttctgcaattcgctttgaacctctgtctattacaggatgaaggagaccacgaggtacgaccgcgggtcgaacgccttaaagctacgatccacattgctggccatgatattagcgctgaagatgatggtgggatttgcagcatgtaccgggacaccgatggctggaggatgataaagccatacctggccctcattgaggcgaaaagggcgtttaaatatctcgactttgacgagcggacgggaaaacctaagccagtagtgtcaaatgagaccctggctcagtaccttgccgaagcggtgatatcatggcgagcaaaccgaggggaactgggccaagagtaagtctatcattggtttgtggcattggtttgctcttcttttgcaattgttgacatatgcttctatctacagtgtcttcctcctcgcagcgacgaatacttttctacgtgtcattcatttcaaattcggctctcattatggcgaatacatcgatgctacaagaaaggggacacagaagatcctggtcgatgacgaaaacaaagacacgtttgtctacatgaacagcactgaatggtttaatctccagacgtctgggggaagaaagtctgcgctgtgccatattctagcgataataaggtggcatgacggagactaccccatacgtttgcctgtcactcatgactccagtgtccccgaggttgacagtgattttgagactgactacaatggccccgaggttgactatagtgacgaggttatcagcggagatgacggtgatctccccatggaagaccatagcgattaggatatggatatggatagtttctgggagattaagtaaggcagaaggttgcctacgggattgctgtgcactaagggaggcattatgctatgggctcgtgttgcggaattcgaagtcggcctttaggccacgaaagaccctagcgaggtcgaagtaaatgaaatctacttacattctccttagttagttacatgtttttgttttttttttttgactattaattgtgtcccaccaaattgtgattttcgggcattgcgatttcctacctatatacagtctacctcatatggcttctgggcctcttgtatgtctttttaaatgtcttgaccatctcctgagcagccactctaaccatggaagctacatagactatttattggcctttctcccttctcgttctctctctcttacacacaccatcacaatggacatcatcatcgctctgcacacataggacacattctcatagcaagtgggcttattaccatgccgaacgaactggcagtacgagaaatagatcgccaataacacaaccaccatatggacgaagctttaccattcatgcaagctagctcaaactctttcatcaacgccaccacagactaattcacccgctggaccagcgtcgtcaacatcaaattcaccacaaagattttacttttgatatttgagtctttccttctcttttcttcatgttgagtatggaagatgtgaagggagaggagggggagaggagctccagccagtggaacaggatcagcatgctgcaaagtggtcggcagattgatctgcttctgttcttgaactgactacatatactctatccttaccttatcattacattctccttcttatataattagatagcactgactacgagctcaccctctgcaagagtaagtctaccattgggtttgtggcattatattgctcctcttttgcaattgttgacacgtgtctctatctacagtgtcttcctcctcgcagcgacgaatacttttctacgtgtcattcatttcaaattcggctctcattatggcgaatacgtcaatactgaaagcgagggaacacagaagatcctggtcgataacgaaaacaaagacacgtttatctacatacacagcactaaatggtttgatctctatgaatacaccacattgaccctgatggagtttgccgataaacacaaggatatcctcaaggatgtttccaagatcctggggtggctggcaaacgtgagcagcgtgggcaaatccgatatggagcaactgaaggccaaatttgacgacctgaaactctaagcggaacagaatcttccctcgaaggctctgggtgattggaacctggaggaggtcgagagtatctttgagatccagctgctttcatcggagaatgaggagccgggagatgagtgagacttacgacccattctccgagaggagttccaaatcccagccgcctttgacgaattctacgatttcctcagtaagtacccgtactgtggagaataaggactgagaacttcgagcgctaattaactcggagtccccgataagttgcattcaaacagaaaccgcaccctggttcctgtttcacatctactgcgcttttgtagcatgaagctgatatagaagcagaacgaatttggaaagctaagccagctatctaattgtcatagatcacacaccccttctatgaaagctatgtatgttctgttcatacatactactttacactcgtaaacttcaacacagcactgtagtctgcatatttcttccgggaattagggttaatgatgttaaatccattgcagcattctgagctttcttaagattcaagaacgcttagcacctctctctctatctcaccactctttcaggcttctatggccgtccggctcatgccggtacccagctattagcccttgaggcttgtcactccttcaatttaatctagaactgaaaaccaaacagcagagagcaataaaaagataaatagtatgtggtaaataataagaaagatgaggtgatggcatggaatataagctgacattaatcacaggtgacgtggatgtatgtagaagtagaagcgtctcgccaaacaaacatcgggggacttccgccatccgctctccactaaagtctcccacctcaactttccccatctctacggcctgtggcgtcttgcagctccaagcgagcttcaatatgtcgctccgaatcaaccttccccctgctactcgaatctgtctcgtcagccttctcactctttccctactctataacattgccagatggcggcaaattgacaccaccggcggaacaccgaccacatcgcctctcgtcccctacctgacgctcgtcccttcattcttcttctactacccctggacaatcgtcacggccaccttcgtcgagcagaatatatttaccgtcctgttaaatgctgccaccatattctatggcggcaagtacctcgaacgcgcgtggggctcgcgcgagttcagcaagttcatcgcagtcgtcgccgtgatcccctgcattgccatcatcccagtctacctgatctggggcgcagtgggaggctcctcaagcagagcgtatgcaccccccaaacgagcacatcgatcaccaccctataccaaacaaacactaaccatctaaaaaaaaaaacagtctcacccaaatatgcggcggcgtctcaattcaggcctccttcctagtcgccttcaaacagctcgtcccagaacacaccgtgacaatcttcaaaggaatcatcaaaatgcgcgtcaagcatttccccgccctcttcctcctcctaaacagcattagcggcctcgccatcggaacagacaccgccgcagtcctctcctggctcggcatcctcaccagctggacctatctccgcttctacaagcgacagcccgacctaaccggcacatcgaacggcacaggcatcaaaggcgatgccagcgagacattcgcattcgcctgtctattcccagacgtgatgcagccacctgtcgccttcgtcgcagaccagatctacaccctgctagtcaccgctaagcttctgacgccgttctcggcggacgatatcgcctccggtaacgagctggtgctggcgagaggcgaggcgggcttgcccacgctgttgaataatcagcgtggggccaggggcgccggtaagcgcgaggaagcggagcgcagacgggctattgcgctcaaggctttggatcgcaggttgcaggctgccactattgggcgcgtgcagtcgcctggtttgggggagcctagctcgtcgatgccgcgtcctaccacaccgaatccgactgcgccggctgggcagagtatgctgggggaaacgagttacaatcctgatcatgcttgagtgatcgagtgcttccttttttttttctcctttttttctataactctggcgttttgtgatgcactttgggatttggcctattggacatattcgcattcgtggcatagctggtttgtggcttggtttctttctcatactgatagttatactgatagtgtgtgcacttctgatgatgtacatgatttgttcgatttgggggtttgatttctcgctctattcattaggctgatatcttagcgcctggctttttggccttgaattcgatttgttttataccagagagcttgtatgttcttattcgaagaaacaattttactccatgaatctgtacctggaaccattttcaatcaggtatacgctgtattttaattatcctaacccggctattcgctttctgctcctatctccatctcagcttcctcttcgtctagcaacggcacaaaccggaagtccacaaagcacacaggtccattgggaccctttacgccagcaccgatcgatctgcccactggcacattatgatcatcaagctcaaccatgaactgtaagctcaacaccccctgtctatccccacggatgctgaccttattagcgacagacatagctctcgcggccttgcgaattaacgaaaagcgatagctctgttgaatgcgctcgcccatagaggaaggaggagaaacaaggaaagtctctgtgaccgtaggtgcaagcttagctttagttgcgcgagtccgggcagcgccattatcgagcaacaccttacgcatctgagattgtgtggtgccctgaccagcgccaccggcaatctcgttatgctggtcaactgagaattccacagtggattcactgaacgggccgcctgcaccggagagagcaaagtacggttctcgcttggcacaggcggacagttttaggatcgtgggggtggaggagtcgagttcggcaatggcattgtgtagccaggcggagcgcataatgattttcatgatgatagcgtcgcgctggaggggaatgtctgcttcgtcttcgtcgggctcatatgttactagctcgcaggttgttttcacgccagcttcagtgatggtgatgctaagtggggcgccgtgttgggcgtattttagggtgcaggagcggtccatgagcaaggctggggcgttgaatgcgcttgacgaggcggtgccggtttgcgtgatgctagtgtcgcggggtcgattggactcggagagctcgttgataccgaagatctttagggtttcgaggatagcggtgagagaaacaacaaaatgagggtaagcctcattttgcaattcattgtcttcttggggtgttccgttctggttgttaggttcagggtcggtcgatggattgaatgtgtagctggtgaagagtgacttgtcaagaaacgctagtccttgaatgacgcggccttcctccactgagaatcggaggccatccggggtgatttgaacagtggccttgtgtgcgaaaccaatgcaggagagcagcgtgtagagatggtgggcgttgttggagacaccagcgaaaaggggctccattttgtggcgtaggctggtagctcgaacttttcaggcgcaatactggcacagaacaaaggtaattgatccgaagatgcgtgatgactttggatatttagcagtacagaccctcttgaacccaacgcttatggtacatttgaggggacgcgcaataggaaatgtagccggttagacgtagactccggcggcgcaaatcatgaacacagctccaaaactatccgtaatacccaatcagtatatcgtatgcctaaaaatgggacgcagcgcattactaacccagatgccaatgcggccgggatgcccaaggatacgatgccgaggaaagaccgatctgtttggtgtaatgtcagagtcaaattcgttatgatttggaaagtaacttactcaagccaaatagagtggccgtaaccaatgctatcaatattagtcagagattggctatttccaaagctgtgagaaaccagaagcttaccgaggagcagcaagttgaagccgacagagaattggctatccttggcaataagagggatgaatggagttgcagaggctgcctcccagacttcgttcagagacattaggataatagaattgataaatgtaattgagggacgaattgatgcaggtcaaagatatgcgaaagtgatatagatcgactaatgttaatctggcccgaccggcggttagttgttccgaccgataccccatgccattgtcggcgcatggtcacctgggcaggtttgaaggacaaggacattatgattgctgaatcgccaaagagtaagtgaactttcatactttcacattgtattttgtcaaactatttctgacatacgactatggtatcaggttccaagcgcaaagcctctgaggaggcagcttccccggaatctgggcagcagattagcaagaaggcgcgcacagattccccagtgaaagaggtaagaggctccccagggctactatgtaaatcgcttcgcgtacctgttctgacaagtgccccgcacaggaagatggcctccttcaaaagcctccgctccgaattgttccattccctgagaaggtaccctcccatcccacgccaccatatcctatgtctcttcgtggacaatggctgatgatcacagcccgccgttcttgaagaacgccgaggcgacattgagttccgtgtcgtcaacaacgatggttcccacgatagcttcattgtcctcacaggcttgaagtgtattttccagaaacaacttccgaagatgcccaaggactacatcgcacgccttgtctacgatcggtcccatctctcgatggctatcgtaaaacatccactggaagttgttgggtatgtcacaagtgcctgctgtcctttattggttggattaggccactgacaaactacagaggaatcacgtatcgtccgttcaattctcgaaagtttgctgagattgtcttctgcgctatatcttcggaccaacaagtaaagggatacggtgcacacttgatgtcccatctcaaggtagacatgcttatggatctgcaatttctatgcatatatctgacttattgccctataggactacgtgaaagctacatctccaattatgcacttcctcacatacgccgataattatgccattggatacttcaagaaacagggctttaccaaggagatcacactcgataaagcaatctggatgggctacattaaagattacgagggtggcacgctcatgcagtgtactatgctcccgaggattcgatatctagagatgggacgcatgctcaccaaacagaaagagtctgtgcaagccaagattcgcgccttcagtcgctcgcatatcatccatccccctccgaaggaatggaagaacggagtgtacgcgatcgatcctcttagcattcccgcaatcaaagagtccggctggtcgccagacatggatgaaatggctcgccaaccacgccatgggcccaactataaccaattgctccacttgttgaacgatatgcagaatcacagcgcggcttggccgtttactcaacccgtgaaccgcgatgaggttccagactactacgaggtaatcatggagcccatggatctgtcgagcatggaagagaagcatgagaaggacttgtacccgactccacaggacttcatcaaggacgccatgttgatcttcgacaattgccgacgctacaacaatgagactacaccatatgccaagagcgcgaataagcttgagaagttcatgtggcagcagatccggaatattccggagtggtcggttagtatccacagtgaagctgttctcaaagacaattctaactctgatatctagcaccttgccgataatcattgatcctgggacatacattcattgcagcgagggtgtttttctggaacggcgttggggaattgaaatttgataggcaataccctgttgatagattacaacatgcgattctcattcatgaattaatgccagtttatgaatctcttctcaatgttgatcaaatagtctagatcgacgtctagctcaacccatggatggatatgttgatctattttcccaccaatcagatctatagatgctatgcttggtacggtggggctggtatctgtcaagctcgagttgatgtctatagtagagcatagagtagcttggatcatagcagcagagtatagaagaatatacataggtagaaggcaatataaaggcgcttatatgcatgatgatatgtgatgcaataacctaaaacctcaacgttaatttccccctgacagggcttaatctcggattatcgttgttgcggggtctcaacaatgctgatggctggaatagcctcacagacttcacccttacgtcttttgttccgataggacttgtgtttttcaatttttcgttgctttctttttttgctgttgctattgctgggccgacctagttgtgttacaacctcaggggctcgatatccacacaccattcattgtttacgcaccaacgtggagctcaattcgtttcaacccctctcatttcgctctcgattttcaccattcgctttgaatcgcctccgtcttacccccgtatcttttagggtgtgcagagattgctggcccgcttgccgacgcgaccttaatctctcccccttttgctcccccgcctttgctttgaaatttcggtgctggtcctttcatcgttgcctactctaaacacattatcgatatgtctcatcatgatgttgtcgacgcggagtcgcgtaatcggctaccgactctctttgaagttctcagccgccgaactctcgccccggtcgacctcttttcgttctacatttacatgcgcgatcagcagcgttccgtagactatctagacttttggtgagtgtaagctcgcgttggatgaccgtatctgaagttaacgcgacccataggcttgatgtatcacaacacatgctactgtgccgacactatgtccgtgaacttcgccgttccgtcctcgtcgcgacacccgatctggaaagagaaccttctgccatgctagacaatctggagaacctaggtgatattccgctgacagaagctgggccttctcgtctaagacacggattccaagaaaacgaaaagggcagagatgccgaccaacgcctgtctgcttttcttcgctccgaaggccacaccacatcaccctcccgaaacagtccaagatcttccggcgaatcagcgcaccaagcctcttcctatgacggtggccgtgacaccccggattcccggcttgacgactcctcccccgggcacacagtggcccgcaatgacattcgcgccagcgctgagaaaatcttgtacacatatctgcttcccggttccgagcgagagattatgctgccagaatccatggtttccacgattatcaacctggttgaggatgacggccgagatgaccccgaagtgtttgaccctgccaaggactatgtgttccaggccatggagcgtgatgcattcccagggttcttgcaagcaaaggctcttgggaacatggttcctttgagtaccatcttgcgcctcgcttttgctctgattagcttcggcggaggattctggggtgccttctacgttgttctgcggaataagcctcggcatattcgttgctgggtatgttgatgatcatctctaagcactaatgaatctgtctgctaactttatttcaggtcattcttccatttgctgtcgccgcatacttcatcatctcctatcagtacaagatcgaccccatcatggcgttcctgggctacagtgaatacacctttatgaactgggccccaattcgcgagccatatgtccgaaagctgctgaacaagcgcgccgtcgtcactgcgttgatcgcctttttcacagcggcagctttaagcatcttgtttattttcgtccccggtaccatgatgtgagccgtttaccacgtccagtgtccatctaatacaaacttcaaaacaatcaccccgtgaacctcgttcgatcattcgatcattcttacgtctacaattgactcgacttgacctgtccaaggcgttcccgtcgtgtccgagtacagaggttttgcttctatggtgcatattcttgaaaaagactatgtctcggatctgcagcccattttcttcctgggagctatacagaggtgattgtttcctccatccgtcctatcccgcttattagcggtcacgtctacttcctctttgtccatatttactgtctctgctgctttgctgtgattattttctcttctaccaatacccctcaacacttgaaaatgttgtattgtatctatttttcattaatgagcgtcgccattagggccttacgaatgcaatttgctcctttccgggttctatcccaagagatgaaactaaaccataatcaagtcatttcgtatcataaatcctgttggagccgctgccatcttttgtgcgacataaccatgagcaaatgggagcacctccgcacttcaagacttgcgccccagcaccctctttggctgccgactatttcccgcgcgagcaccaggcgcctcatcaatatccatgcgcgagccatgctcaccaccgtcataattgtcaaagtacccatcatcctcatcaatatcgtccgcatccctcttactccctccgaggccagcgccaagccgaccaccgcgccgaccacccctcttcgccatactttgcttcctcttcttagccttctctaatgcctcatcgtgcgcctgggcacgtgcagcacgcttcgcagcatcactcttaacgcgcgcaatctccgcctccagatcggagacaacctcgccgcagcgcgattcccactcgctcaagttggcgatcatcttagggagggactggggtaggacatcgcggagtggggcgacggctgtcacgttcacggatggtgggttggaggctggtgagaggcggcccgctatcaatgaggcgtagatggctcttgttacgagggattcgagctcggattttgtggggctgctgagggcggtcatcagggcgctgtaggtgaggggtttgattgttgttgagagggttaggagtgagagaaggcggagtttgagggtttgttctgtgttcaactcggggaggtttggggttgctggtgcggggtatcggtggttagcttttgttctggtaaatttgagggttcggttctctggggaggtttcatttggatggtttgggacatggtttggtttctgggctttggatgcgtgcaatcttactttgatattcttgccatgtgccccatgcgaagatctctagtagctttagatagcccttaaactcggctggagtgtctggtgaccgtaatgcctggatcgttggcagctcgaggagctctgcgaagacgtaggtttgcgcgtttgaggtggcatttgtgatgagattcgcgataaagcgaggcgaacctgcgctgttggagcgggctaggtggatgaatggttggagagcctctagggctcgtgtgtgggtttgatccattgtgatatggttaaccgaggtgtaggttcaatgagggtatttggggatattggagagtaaccaagaaagaggactgcaatatgggtgggatatacgtggtagctgagttcaagatgggaagcatcaaatgtagtcggagatgcttgtttgcattgagtgcaaacacgtcttatctgattcctctacaactctacggagtatagagccttggagggctgttgctttttgtttttatttttcgtatattcattagttcctacttctattctgttattgcttattctatctcgtatctattatataattgaatgctagcgtggtaatctcagtgcagggcattctgcaagtatagcaaagcgacaatcagacgcagtgtaaccaggttcatctctgtagacatttgaaacaaccacttattttcgtattgcttagtctgtttcagccttccaataacccacgaaatttgatattaattccctcggggatcacttttaatctaattgaaaacccgaccatctatatgtaatcagctgcccacgcggacattccatagcgtggcagagtcggtccacatcaccgaggtcctattcccgagcaaatccactttcttttcctctctccccttgcgcctctggctgattttcaataaaatccgatcgacgtggccttctaggcagactatttctttttaacttctgcagttctctttgtctgctcaacaagggaatgatctgttagtcttgcgccatccgagaccttccgtccctcagcacgttatcaccctccgccatcgcgtcggaggtaatttggtagacaccctccatatgctatagtcgtcgtttctcgccgtgttcgcctcgcgcttcaccgtcgagcttcaccgtcgagatgttatctacaaatccgcacgccggcggggccggtcgacccgcactggccactacaactctcaagatcgacggaatgacttgcggagcttgcacatcagccgtagagggcgcgtttcaaggggtagacggtgcgcacgatgtgtctgtcagtctcatcatgggcagggccactgtacaacatgatccgtcagtgttaccacctgcgaaggtcgcagagatgattgaggaccgcgggttcgatgcgacagtactttcgaccgaggaacaaaggaaccccgactctacttcttcttctccagctatgagactatcggtgaccaccctagcgattgaggggatgacatgcggggcatgtacgtctgctgtggaaagcgggttgaacgatgtcagcggtgtgaactccgtagacgtatcactactttccgagcgcgcagtcgtggaacatgatgcaggcatcatcaccccggagcagatcgcagagctcattgaagatcgaggttttggagcgcgagtgctggatactgctctagtgggctccaaggagccacctgcaccggctggctcggaagagaaatctggacttctagtcaccacgatcgcaatcggcggtatgacatgcggcgcttgcacatctagcgtacagggtgccttgggcagtgtggatggggtaatccagttcaacatcagtcttctggctgaacgagcggttgtcgtgcacgacccaaccatactccctgccagcaaaattccagagcttgttgaagatgctggatttgatgcgtcaatcgtttcatcagaggcgcaggcatcaatttccaaaaagacacagcagataaatttgagcttgcatgggctgcgggacggcgtttctgccactgccttggaggacaatattttacagcattccggtgttcattcagcatcaataaaaatggctacctctcgtatggccatttccttcgacccatccacaatcggaatccggtctattgtggaaataattgaggctgctggttacaacgccttgattgtcgactcagatgataccaacgcacagctacagtcattgtccaaaacaaaggaaatccaagaatggagaagatccttcatcatcgccgcatcttttgcggttcccgtgttccttatcagcatgattcttccgatgtatttgcccggaattgactttggccgctttgcactcgtcccgggcctatatctcggagatgtagtctgtcttgctcttaccattccggtgcaattcggcattggcagacgattctatgtcaccagcttcaagtccctcaagcatcggtccccaaccatggacgttctcgtaatgctgggcacgtccgctgccttcttttacagctgtttcaccatgatcatgtctctttgcagcgcggaccacggtcgtcctagcaccgtgttcgacaccagtacgatgcttatcaccttcattactttgggacggtggctagagaaccgagccaagggccaaacttccgctgctctttccaggctcatgtgtctgaccccgtctatgactactatctacgaagatcccattgcggcagagaaactggctgagcgctggacctccaaacctgtacatggcgcgcctgagcaacccacgttgggtgatgatatgacggtgaatcaaaagtgcattcccaccgagctgattcaagtcggtgatatcgttatcctccatccaggagataaggtgtctgcggacggcgtgatcatccggggcgaaagctatgttgatgaaagtatgatcagtggagaggcactacctatccacaagaagaaaggcagtcaggtcattgctggaaccgtgaacggcacaaactcaattgatttcaaagtcattcgagccggcaaggatacccaattgagccagattgtaaagttggtacaggatgcgcagacgagccgtgctccgattcagcgcatggctgatatcgttgctggttactttgttcccaccatcatcggtcttggtttgataacattctttggttggatgttcctcagtcatgtattagctcatccccctacaatatttgaaatggcaggcagtggtggccgagtcatggtctgcttgaagctgtgcatttcggtcattgtctttgcgtgtccctgtgctttaggtctgagcaccccgaccgcagtcatggttggaaccggcgtcggcgcggaacatggtatactcgtcaagggaggtgccgtgctagaagctgccacaaaagttactcatgttgtctttgataagacgggcaccctgactacaggtcggatgagcgtggctcacacccgaattgaacctcaatgggcgatgaatgactggcgccgtcagctgtggtggcttgttgtcggtctcgcagagacaggaagtgaacatccgatcggccgtgcgatcgtttctgcggccataaccgaatcaggccacgccggagaagatgggttgccagggagcacgggcgacgttgacaactatgttggtaagggtgtctccgccgtcgtcgaacctacatctagtggccagcgtatccggcaccatgtcctccttggtaacgccagatttctccggtcccaagatgtccctgtacccgctgacgcagatcccgactctgcggaacctgtcgaagacccggaagctgacatccccaagccgggtgtcaccggggccggcactacacgcatccacgttgcaattgacaaccgctatgccggaaccatctccctccgggatacagtgaaagagacagccgtggcagcagtagcggccctgcatcgcatgggcatcacaacctccatggtaacaggcgacacgctctcaacagcgatctcaatcgccacagcagtcggcatcccaaccgccacaatacatgcctccgtctccccatccgagaaacgctcaatcgtctccgccctccaagaaaaaggcgagcgcgttgccatggtgggcgacggcatcaacgactcccccgcattggccacagcatccgtcggaatcgccctcgcatccggcacagacgtggccgtcgaggctgctgatattgtcctcatgcgcccggacgatctactctctgtaccagccagtctctccctctcgcgctcggtcttcagacgcatcaagttgaacttaatatgggcttgcatgtacaatgtcatcggccttccattcgccatgggccttttcctgcccttcacaggcttcatgctaccccccatggccgccggtggtgccatggctctttccagtgtgtctgtcgttgttagtagtctgctgttgaaattctggactcgcccatcttggatggaggttgagcgtcttgagaaggaggtccagtccggtgcaatctctgcagctggtgtggcgcctcgtaaggggagctggtggccttctactactattttctctaatagcccgcgctctctacgtcgtcgtgttgggaacgttttctcttcgctttggtctctcgttactggcaaaggacccatgccggctgaccggggtgatgatggttatgttccgctgcagacagttgagtcgcctgtttaattttgccttgtcgaattccccatataaagacttgtcctgtataacggcttacttttgtttgatgcctcatgtatttcgggcctagttttggcgttttgtttttgtttttcctcatttgatacctcctccgttaaggtcatttctgcatttgttccaagatcctcaagatgtaaaaagcccaaagacaaaagtaagggataggtacatcttgcttgtttgcctgttgtttaacgaaaagtaggttctagtatactccgtacgatctgtctcttccaatatcctattgttcgcgtatccagtggtaaggaatataagacatacgcgcacttggcactcctttcaagttataggatggagaaagaggctccattcaatacctgtagagctagctaaaatatgggtaactgtaacgtattgtcaccccaatgaaaaatctcgtcctcgagatctggcttgggtacatagtctcttactccagctatgtgccctgcttgggtacataactagccgcgtagtgccataggagctcggtgaatgaccacatttagggtgagaaaatgcaaagtgctagaaattgcgggggagaaaatagagtcgatgtatggtcgatctttccccacaaaaagatttctccacaacatagggtgcgacttttgacacactgtccaccatcgtcatcggattgtggctctactaggcacgacagatatcaatgatgcaagcgggcctattgaagaagacgggtgatttgtatctgatttctacctgttccactatcttcttacgccccagtttccacgtcgtgagtgttttactattttgcttgctatatgctatttactaaccacatgcgcttaccagcaccaagccaaattcggttgacttgtgaggatcccgcaatcctcgttcaaaaatacgggaaatacctccacagcgattcgacaaaaacatatcgcgtcgtccttgactctcagagactctcagaagtctttggcccttgggaatttgcgtgttgtctcccgagatgatctcctggaacgatatctaaatactatacgcgaacaagcaatcgaagctgagcgcctgaatgaatacttagtgttgttgatatttggccatggctccttggatcatcatgtttctgtaggaaatcatttcctcgaaatgaaagacttgcaacgcattctccaaggaaagtcactggtcaccatctttcctgttactcgggaggttgacttgtcaagccagattacagaaatcaacagatgaatgtgaccggtattacagcagcaggtgaagacacaaagtcttcatcatcgcccttgagtagaagtattgggcgtgtaagcggcagtctggagtcgttcaatgcctagtcgagatgcaagccgacgaagcccaaatgaacactcaaaaccccattgaaatgagggaaacaatgtaccatccgatgtaaatacagctagcagattctgtgtattcattctaattttaattctaatcaactccgtacttaagcttcatctacatctttagactaaacctatttgggactgtctgcctaaggcaacaggttgaccgcattggagtgcaaacagtgcaaacaagtgggcgggatgactccgaggcttttttgtgctcttctttgataacaagatcaccgcgtttcttgtgtgctatttctggagacggtatctgaaaatcccttctgaaatctctcagtttactttcgccaaccttcggtttaacgggttgttgacacatttaacgaaaaactgccctgccgctcttccaccggctattcacgaaaaatagttcttgcgattctctagattgatagagcactcgttgctcacacgcctacaacaatggcccccaaacagaaatctgggcaaaagccaaagcccaatgcggcggaggaagtggaagagaccttccaagctgtggtaggtctagcagttggcaaatgcttgcgtgacttctctatgtgttatatatttactaacctgtgctttgcttaggtgttcgcagataccttcgagacgagattcgagcccttcacccgtgacaagcctcgtgtatgttctacagcaaaccatctatgcccaagacttcgaattaacgaaccaaattattagtgccttttgccactcgcaaataccccgattatcgaatacaccctcgaatttctggccaatgcgggcgtggaggaggtcttcctctacggaggagcgcactcggatcagctggagaaatacatcaagtaggcttgccctaggactctccggtacggatggcagagctaacttatattgccagtgcatcgaaatggagggccctgtcttctccattcaagcaattgacattcctcaagtcgacttctacctctgttggtgacgttatgcgcgacctggatggaaaacacctcatcactggagacttcattgtcgtgagcggcgatgtgatcagcaacctgcccatcgaaggcgcattggctcagcaccgggcgcgtcgagcacttgacaagaatgcgatcatgaccatggttctaagggaggctggcctacagcacaggaccaagtccacctcaatttcgccaatttttgtcattgaccccactaaggaccgctgtctccactacgaggaaatcgaccgccatgcagacgaggagcattcctctcgcttgaacattgacgccgaaattatcctcaaacaccccgaattggacatccgccaagacttgatcgactgcagcatcgatatctgcaccccggacgtactgagcttatggtcggatagtttcgattaccaatccccccggaaacactacctgtatggtgttttgaaggactatgagctgaacggcaagactctgcacacatacattgtcaaggaccactacgctgcgcgcgtgcgcaacctgaaggcctacgacgcgattagcaaggatgttctctcgcgctggacatatcccttgtgcccggatacgaacctactccctggtcacacgttcacccttcgtaaaggcagcatgtaccaagaaacaggggtgaccctggcacgctcttgcgtcattgggcgccgcacagttatcggacaaggcactagtattggggaccgggcagaagtccacaactccgtactcggtcgaaactgtaaaattggccgcaatgttaagctggatggtgcctatatttgggacgatgtcgtgatcggcgataacacagacgtccgtggggcgattatcgctgatggcgtggttctcggtaagaattgtgccgttgcagcgggatcgcttctgtcctatggtgtcaaaatcgcagataacatctgggtggagagtgggaagcgtatcacgaaaactcgaaacgacggcagtgtgggcaagaacgatcccgcagtcgttggcgaaggaggcgagggctatgagtttattcacggcgaggaagaggaagatgaggacgacgacgtgagcgtagcctcatcgggacttggtatgtttttttctagtgtgcttcttcgggtccgcattactaatttatgctatccacagtgtaccgcatgcccaatctctcactttcttccgcctccatttcaacactatcatccgaggtctcaaatacctcctgggcacgatctgagcggagcagtttctccgccgacgaagattccgacaatttccaccacgatgcatcagtcagcttgttcgacagtctacgcgaaggcgtggcagcagacgtggtacagcttgagctggtcactctgcgtatgagcgccaacgcctcggacaaccaggtccgtcgcgctatcgtaacatcgtttatgaagcacatccagcagctcatggagggcggcaagggtgccggtccggcagtcaatgaggtttttacggcatacaaggaggttattgagcgcactctattcgatcgcagcaagggacaaaagaaggaccaggttgatctactgctcgcgctccagcaggatcttattcatcgtaataagggtgatatggtccttctctttactgccaagtctctatatgaacttgaccttatcgaggaggaggcttacggccagtggtggaatgatgagcggtccagtaactccgaagagatgcggactatccgtaaccagacccagcaatttgttgactggcttgccgaggcagaggaggagagtagcgaggaagaatccgaggaagagagtgatgatgagtagataccacatggttttattaaaattccaatatgacattccaaaattccttttacatatgtaattcaaaccctaggatatttttcattagagtcaaatatatcatcttctttgacaggctaccatgagtctttatcacgaaagcggagcctacaataaggctgacaagtggaatgattcatatctgagtcaatgggcgcctgaaagaggcggatatttagacatcagctgaccaaccatggaatctttatttacgaacttctacgaacgtctgattttgtttcagactcaataaaattgtagacattcaaatatcacgaaaatcgtaattccttcgaataccttcgagtaccggttcgagccgccttcgggggcaacagcccggagatcttacgcttccccactcccctctacccgtgcccgtcacaggttttacccagtggcgtctggcccgatctctcacttataacatcccccccccccccccctgtcggcacttttgccgctaccttcaccacgcctcccactacacgaaagagaaaggcggctgaggcgattgcggacgaggcactgccaaaagccgcccacggcttccggaaactcaatacatccgacaggttctcccaccaaagcgagtcaacagcgaccacaacagaaaccacagaaaaagaacgtctcggaaattccgacctaaagaacaagccccctgcgacacccactaccgccagcatggactctgacgatgatttcatgagcgacgtctccagccaggatgatttcttgggtacccagggctctgacgatgagagcttgggtgaaggtacatgcctgatcttgcgttgtttatgttttgtgcgactgtgtctcgagtatagtgactaacagatgtgccctggggagcagacttcgatgatctcgacgccggattctcggacgataaagacctcattaaacataaaaagaagccatacgaagtcgagttcaaggttcttgctcctgcagatatcgatcacgaacagcttggccaggtcaacgaggtttgcgccattctcggactgccgcctgagtcggcggcgattttgttacggttcggccggtggaacaaagaaaagttgatcgagtcttatatggagcatccggagcagacgctggaggaggctggtcttggatcgaactttgaggggaccgcgaagaccgagtgcatcccgggcttcatgtgtgatatctgctgcgaggacggtgatgacctcgagacgtatgccatgcgttgtggtcaccgatattgtgtcggctgctatcggcactacctggcgcagaaaatcaaggaagaaggagaggctagtcgaatccagtgtccaggcgaccgctgtaatcgcatcgtggactctaagtcgctggatctgctcgtgacaaaagagcttcaaggaaggtgcgtgtttatgcaggcaattctagacggaagcaagagttcgctaacacatctctcactacagataccgtgaacttctaactcgaacatacgttgacgacaatgagaacctaaaatggtgtcccgcgccaaactgccaatacgccattgactgtggggtaaagcaacgtgatctccgtcgcatagttcccacagtgcgatgtttctgtaagaatgagttctgcttcggctgttccctcagcgaccaccagcccgctccatgcaccctggtcaagatgtggctacagaaatgtgaagatgactccgagacggccaactggatctcggcaaacaccaaggagtgtaccaaatgtaactcgacgatcgagaagaacggtggctgtaaccacatgacgtgccgcaagtgcaagtacgagttctgctggatgtgtatgggtctgtggtccgagcatggcacgagctggtataactgcaaccgctacgaagaaaagtcaggcgcggatgctcgcagtgctcaagccaaatcacgttcctccctggagcgctatctgcattactataatcgctatgcgaaccatgaacagtctgccaagctcgacaaggacttgtacctgaagaccgagaagaaaatgactagccttcagtcacagtctggtctgtcctggattgaggtgcagttcctggacaccgcgtcgcaggccctgcagcagtgtcgccagaccttgaagtggacctacgcctttgcattttaccttgcgcgcaacaatctgaccgagatatttgaggataaccagaaggatttggaaatggccgttgagagtctcagtgagatgttcgagaaaccagttgccgagttggcaggactcaaggtcgatatcctggataagactacttactgcaacaaccgccgggtgattctattgagtgtcactgctgaaaacttgaagaatggtaaaggaatcttagatatcatctgagtacattgctaacacctgttgctaggagagtggacatttaacattgattggtaattgacaaaccatcttcagctttctctcgccggagactccgggcgagatcttgacgacgtgaacgacatctatttttttacaagttccagcataccttttcctttctccatcatccttgaccattaaaccgttgaaatcatcgcccttgcactgtttcgcaacagcaacggccagatctatccatctccaaggctatcataggcattttttttgtcccgcttcctcgaattggcttgaatagcctgcatgtatcctcatttgatgggggctttttttgggagtgtttttcatcagatttcagcttctctttcctcattgttttgagttcaggcgcagcggtcttttacagaaatgattattctcaggtattatagcagggtgaaattcccccattcaacgcaccttccctttgaccttactaagcgtagtgactgcccacatacgctcctacacaatataaagtgactctatcagtctctaagacagcccagactaatatacaccgcgtccgacctatcccatgacttgaagtgcaaggttttcccgtgagaaacagggggccgtcagcaggaaccaagccaatatagcagaccagatgagtttagttcgcggcttgtaggtccaccgggcctcggcatgccccagtcacaggtcgcgtgttctgctttccctttgtctgccaagttcgttgaaacgagagccaaagttaataatgcaatatgacatataatatcaaccaagcacacccgagtatgtatgtataaagggggtgggttatcgggggttccaatcgaaagaaaatccttctcgaagaccaggaagaagccaaagctccacccaacatgagttaggcgaaatgtggtcaagggcgaagacgggtttgtttagtagccatcttatctgattgattaaatcaggtacctgcggcgtacctgtaccgttggcgctacactgcgaaggtactggtatggtactttacataaaaatttaaggtgctggcaccaggatctgccccctaaactccgtcatcggaagtttcggagattttttactcttccatttatcggtacttacttgtacggggtttgacgctatacaacataggcctttattcttgcccggagctgtacggaatacgagttatgtagttcggccttttcttgtggtcgagttagtcccgaggcatggacgcatggagcagctggaggcccccggagtctggccgccgattctgaataagccatgcatacattctctagggctacggattccctctaagggattgaagtaaggagaataagtaatatagaatgagaataggtagcaaataggctctagcagtcaacagaacagcaataataagggtttttagagtatagaatacctaataattctaataatcaagctgggtggataattttcctagcgccgtttcctggtttttgtgtccaaaacacctaaatttccaattatttccagctattccgttgaaaggaaaaaaaaaaagttcttcttacatttctttgttcatttattctcccatttggttggctttttgttcttgtcgtctcgtgttggcattgtgctgttccttcctcgggatctctaacctaatccctgtttatctcatcttcacttttccattcctccgccctccgccgcagtcaactaccctcccttcctctctgtacgaactcttcatctgctacagctgcgccttgagctagcggaagctccatggcggcttccgatcaaatccccgggcaggaattcgagtatgtcgctcttagatcggttttttttccccaggcaatcgggcatcgggatcgcgggaatgaacgaacacagggacaaaatcatcttattttcgagtgatatgatctgctctggctattgctcgattgtccctgttgagcatcctgcttttttgtttgccctgttgtcgctctggaattcaattgtgtggcctaagctaatgcgatacactctgttctagctatgaagcccttcctcccaactatggcctcagccggaatatgctcgctggtgctttcgccgggatagcagtatgttcacatggctgtcaacggtgtttgaggattttggctgatcggattaaaggaacactcggtcatgtaccctgttgacttgctcaaggtaagcttaatttttggttgaaggtgttaagacttggaaaaggactgagcgctgacttgcaaacatcgctagactcgcatgcaaatcctgacaccttccgctggcggtctctacacgggattgaccaacgcggtctctacaatctatcgagttgagggctggcggacactatggaagggagtctcgagtgtgattgtcggcgcaggtgtgtatatcgcgcgaagtcccgggttaaagattcaatttctgattcgcgatgataggtcccgcacacgctgtctacttcggtacatatgagattgtgaaggaaatggctggtggcaatgtcgacgatggacatcatcccttggctgccggtaagattttcggaactgttgaattgatatacttgtgcaacaactgacatgatatcgtgcagctatgagtggttcggccgctaccattgccagcgatgcgctgatgaacccatttgatggtaagtgacccatgtggcaataaaccatgcccagctaactcctctccagttatgaagcaacgtatgcaggttcacggctcagttcacaagagcctggcgcaatgcgccaagaccctctaccgcaccgaaggtctccaggccttctacgtctcctaccccaccacactttgcatgaccgtgcccttcacggccactcaattcgttgcctacgagtcgatctcgaaggtcatgaaccccaagaatgagtacgacccattcacccactgcattgcaggtggtctggccggtgccttcgcggctggtcttaccactccccttgatgtcgtaaagacgctccttcagacccgtggcctcgccgagagcgccgaggtgcggtctgcaaagggtctgttcaacgccgctgccatcatcaagcgccggtttggttggtctggcttcctgcgtggtatgggccctcggattatatcaactatgccgagcactgcaatttgctggtacgttccattccgagactcggttctttaatatctgatctttactgactgcttctccaggacatcttatgagatggctaaggcatacttcaagaagcacctcgactaaatgaacgacttgatcctctcgcatgtggctcgccatgggtcccatcccatggacttgctacttgttcgatataccacgtttgtgtgtgcatcatataatcttactttggtctcttcgggcgacatggggtctgttcttttacaatatgttatggattggggagattgggcggagcccagcaaccctcattgtggcgcatcccgagccagcatcgctcggggtttgatcttgcatgtttagggcttttcatgaaaagcgtttcggcaatgtatagttttgggggaaacgggacacggccactttcgacttcggagaacaaatctggtgcttttctttcttattcctggatacttcgatgaatctcttccattcgatgtgtcctatactgtgaccggcgttggaaaaactctggttctttatttttgtttcctgagagggctgggttctcttgtggcatcactataacttatgtttttttagtatcttgcatgtacccatagacgttaggaattagagatgatatcttttactcaattgatttgtataaaaatgcgacgatgtagctcactggacgcatgcagttaactccgaaatcgacgacgtcacgcgaaaaatcctccccctccacctacgggagatcatcgctttcaccaactccgccaacttgtccgtgaaatggatacaggcgggcctgtatattccaaatgatgcgcccacggcctgcggattccttgcagaagacgtacgacgagtgctatctcgcgtgctccaccgcggtgtactttgagggccaggtaagttcactagtccgactgccgctccccgatgctcactgtatcagaacaacgaagacgaagcattacggtcctggagaaccgccctcgagactgtctaccatcacaatgcccgtcgagtaccgccgaactataccccgaaatccgaaaccgagaaagccctgcaggactccatccgggcgctggaggtgcaatgccgggaacgagtcgatctactgggtgctctacaagccagcaggagagaatctgcagatggtagtaaagagaatggtccccatgtgaagggcaagttagctatcatgccgccgccatcgacttccaacacccctggctggattggagatggaacaatccctgctgtgggatacaccgacctttccaaaccagccgccattcccggtcgccctgtgctgccgaggaaaccaagccatgagccaccaccagcttacgacgatgctggtccagcgaccctctcggcagctggcacgcctgcactgcgcgtgaactcgaactcttcgggcaaatcgaagtcgcgtggctccagtcccgagcaccggaaacccatgttgacaacactgcgtagcagcgacggcaagaagcacagtaagaaagtcaaggtcacatcaaagaagaaggacttgaggcctgctgcttccacagctgcaggcctagcatggggtagcatctatcgctctacatcgggtaagaagcctgtgagtgatgcggctctagtctcatcccgacaaagcgccgcccacgatcctagtttccgccgagagttagacccgaaatctagttcgggagacgagcctctgcagccgagaattcgcctctcccgagaccatctatccgcggaccacatccctgctacccattggcgcgagcctcctagttcatcatctccaaggagatcgtctcccagactacctcctcaatcgcctagtcagctgccgccgccgcggggtcctcgacctcaacctggcagccctaaaacacaacatcctccgcattcaatgaccatgccaaacccggctgactttgcctttgcaccacctaaaccatccatcaaacccaagcctgtggcgttacgatcttcccgtcaaccgacaagcgatccaatacaagccagcaagtcggagaatccttctcggagtatgacgcctcggcccgaccgtgaagcacattcctcccacgataagccgcggacaaaatctgcacccaggcctcccaaagctagcgaaacatcccgcgcttctccatcatcccctagcggtgatgatctccatcacggtgtcgaccggctggctatctctcaaggacatagccatagtacgatacggcgaaaagccccaccagtcaaacaagaacagacaccactgtcaagcgaccaagagtcttcagagcatcggaacacagcaagcgatgcagaggacgaggatgaggaagacgacagtgaaatcttaaaaatcatggaaaagttgcctaggggcgtggatccccagtcagcaaagcaaatcctgaacgacattgtagtacgcggggatgaagtacactgggaggacatagcaggcttagaaggagccaaaaaggcgctcaaagaagcagtcgtctacccattcctccgtccagacctcttctctggtctccgcgaaccagctcgcggaatgctccttttcgggcccccgggcaccggaaaaaccatgctcgcacgagcagtagccacagaatccaagtcaaccttcttctccatctccgcctcaagtctaacatccaaatggcacggcgaaagcgagaagctcgtgcgcgccctcttcgggctcgccaaagcccttgctccatccatcatcttcgtcgacgagatcgactccctcctatcagcccgatcatctggctcagaacacgaggcctcccgtcgctctaagaccgaatttctggttcagtggtccgacctccagcgcgcagctgcaggccgcgaacaaacaagccgcgagaagaaggaaggcgatgctagccgtgttctcgtcttagccgctaccaatatgccctgggacattgacgaggctgcacgtcgccgcttcgtccgtcgtcagtatatccccttgcccgaacatcatgtccgcgagcagcagctacgcaggcttatcagtcaccagcaccacgagctgagcgacgcggatatccaggtcctggtacaggtgacagaaggtatgtttctttcccgtgtatccttttttttttcccatgctctagttcgtcttgctaattgacattaccaggcttctccggctcagatataacagctctcgccaaagatgcagccatgggccccctacgtaatctgggtgaggccctcttacacacacctatggaccagatccgccctatcaaattcgaagacttcgaggcaagtctgtattctattcggcctagtgtgtcccacgacggactccgaaaatatgaagattgggcaaaagaatttggcgagcgaggtggatagagtagatttggatttacctcatcttgagcttttttggttctgctctgtctctattttacacctccttgtctgtggggtccttgtatcttagatagaattataaaaattcaatagcgattcttctttcttcttctgttagcttgaacctatattcaaacagccaaatgtgtcaaatttaaatttcagagatatatattttggaaccgacctgacccatcgactgatagtattacactataaaccaaagctcggggcatcagcaggtggtttcattgtacatttagatatgaattaagtacaacctgtacagggaatatatagatcaactcaacaacacccggatctctcctgttgttcgagggaacaacgatctcaaactccacttttcaccctcgccttcttcgtcctccttctcactggcttctgtcttgccatcggatttaccactccggccgctgacactagccccggttcccatgcccacatccactgttcctcgcgcctcgtcggcggcaataatcatgccttcgacgaactcgaaatcacgacagaatgcttcgactgcatcctcggtgacgctctggataagggaaagactttgtacgcgcttcagattatcggttgcgtccatgagcgcagatgggaggaagtcgtcgagttgttggctcgatgtaatcagggactctggttggaaggctgggagattggctaaatcggctagctggggtttctgctggtctggcttttcggtcttgtcttcggcggtgtctgagaaaggctctagggcctctaagagcgttttcagaccagaggcctcgaggaggaattggtgttgggtatcgagaagatcgttgcgtagggttgataaggcggcagaaatgggaggggcgtgcgtggagctggcgaaggggaagggtgacacagctgcgcgggctgcaaggagtatgtttgtgcggtaaatggactgcgctgtggtggtttggagttcatcggatgaggaccgggctagtgttaggaatggatcgaaggcggcccggaggacagaagtgaacgggttctcgttgttcgcgtctggagataaatcttctggtccgacggacgattcatatgtcttcatcagtacttccaggccttccaatgcttctagcaagaactgtggaggcgacaggtcgtctgatggagtcagggcaatgtgatcgcccgctaaggcgctgatctggtctcgcatcaaagtctcaaagtggccaagagtgaacttttctaagctctgaatcagatccaccaagtgcgattgttcgcccactagtctggtgaaagttgtgcggtagaaggacagcaagttcaccactttgtagcaagtaacagggtcgtcatggctctgaatgacaagctctattctctgccgcaatgatcgagacactccattaagatcgcggttgaccaagtcactaagtgccttttggccatcaaaggcaaccgcctggccctcatcgatgcgcgaccagggctcgctactgaggccgacttcaatcccgcgagcgagttcgtccccgtcatcaacaaacaacgactcgagagcctctcgctctgagacagttgtggaatgcacccacgcaagcatgtcaccaatgtaccgaagtgggtcatgcgctgagaactcaatcggtttgacagtgtgatcaccggcgccaggcccattggccccggaaacagcatcagtcagtgcatagtggaaagcatcggacagcacatagtcccgcgcctccgcaaagaaatccagacagctgtggaatagactcgggcgttctgccagcactcgtagagcgcgacggatcgtactgcttatgcgagggtcctctagattcaaggacctgaattctttttggatccatcggtagagcttttgatatgctgagttgaggttccgggtgctcagttccatcacctccattcccagtcgctggttctcaccgccgagcaagacttcgcaatcgtgatgcacttgcttgacacgagctagcacgtcaaagaaccgttcgtcaacgggctcctcggccgatgtcaagactagtaaatcctcttccggaactaagaaatgcttcgaaaaggcttccaacagctgttgcttggtctcggtctctttcttctgtgtcatcagggtgctggcctcctcgagtaccggcgtggtatcctgcttcgcgaggttgattcgtttgcgcatatcgtcgcatgtctggttaagtgttgagaccaccgttccgattcgtctcaattgctgttattgccatttaggaattagacttctggaccccaatctctaaaagagcaataggagtctcacctctgccacttttccaaagtccttgacaatctccgcgttgcaatcgacaacttctttttgcacatctagtcgtagttgccgacgtgtttctgcagtattatgaatgcccctcaagctcaaagtctcgagggagtctcgaatgtctgagtccgcatacgacgccgacagaactgttgtcaaccgattggtgagggcgttcgggcgctgcattggcggggataatgaagatgatgcggtcggcgtattagcgccattactggtactaccatttggtgggaagtagctggtcattgttgtttgagcaaaccagcggggagtcggcgaggggaagtagaggacaacctccgacttggcgcatcgaccgccttcgccgcatcttatcgtcaacacattactctacttatttcccctgttgattcgctcaatttattcagttctggaattgcattgctacctgaacgtatggatagcccactcgtttcgccagccaaggcccgccaggctgctattcaagctaaagattgggcgtacgtgaactcctggctcaatcgacaatacgcgcccaacccagttcccaagttcgagcgcaatgaagataccctacgtgtcctcctgaccctagctgcagcaaatgatgctgcagatgaagaagcttctctgcagcattgcgcgcgcgaagaggcggtcgaggcatacaaactacgggaagagttcgaacgcaaagatccccatgaacaagtgaagaatcaactccttgatgaagtggaaagttgtttggatgataaaggaagatgcgatctagaggacctcgccgactctgccgtagctctgggcaataccttaaatccgaccccgggggatctggggcagtcgattgtggagctcacggtggaggagttcgaggcccaggagcaaattgcaaaggtcgacacattgcatcggtatctccagcgagagttggtacggctacagacggagcttgaggaattgaagaccgatgtggcgtatgagacgccttccgatacacaaagcttgacgtcggaatggatacgcggcacgaagacacttgcgatcaaggttggggaataccaagatcgcattgcatcattagaaaaagtccaaccccgggggccaactattgaagagctgttggcggaggaggagaatgttatcaggatgcgggagacggtcaaggctctgcaaggccgcgtgagggcgttccatgatcttcccaaggataccccaggggcacgggcaaagtataaggagctagaacgcgagcttaaacaacttaggcgacaacgagattcaatggtagtataggcggcactaaagccagctttctacgtactttggtcttccttctacaacgtttggtctacataatgaatgaagcttctcccacttgaagatgtattcaaagagcaggccctctggctaataaaaagctgcaaatggtaatgtcaactcatgatgagtcttgggtgcagggctgcccgcaaagtcatggaatgatcatgataatgactactcacctaagggagaccatcttaattgccgccgaggccgagagcacccttagccttatcaccactagaggtagttaggatataaatctttggttccaataacagagtaacttacgctgacccagtggcaccactgcggccgtggttgtcactgacacgctggatcttgccgaagccatcctggtttatacccttgctatcatcagtcttcaagccgcgggtagcgcgctcggtggtgtcagtgacactctccttggacttatcctggttgggatcaggaatgatatccttcttagacttgtcctgatcggggtcagggatgggctccttcttggcctctggaggaagaagtagtcattaacgatgtcttaacatcttgaaagataaagcagtggcacatactggtggtaagatccttgcgaccagtgtcggacatgatgaagattgattgaagtttggtgcttgaaagtaggagtaaactatgtagtttggaagtataagatgttgacgaaggaagaatagccgaaagggcaaaaggggggtttatatagacttgtctggcctcattgtaacctctaaaagaagtgttacatgactttcattgtttgctatcatgatcggcttcatttacaatatacaccagatgcaagctaggcaatgtataactctacagatctatttgggccgggaccccggactaaccacaacctccagttaaaatcgcggctcttccaatgggcgtggttcctaagtcccagctgtatccatagatggtgccctttcacgacatataggctgtggcacacgatagtgctcggtttgctccagcaggctttctagaaatgacatcataaagatggctcgggccgttgccacgatattttaagttatgtacataaatcacgggactattcattatctatcacatgttttgcagtcacatgatacagtggcccacatttccaggggcaaccaattctaattggtcaacgatatttagcagaatgactcaccgcctccgtcacctgcttgggcatcaactgtaagtggtctgtctgtgatcaactcggtcgctctcattctcattttgactcacaccatgtgatctgttcttcttcatgcacgagattgtcaatttgatcgttatcgtcgttatcgcttcgttatcgtgcttttatttgctatcggccaaaccctaacacacccgctacatcggtctcattaaactgccaatgactgcgtcggatccccctgtcccttcaaattgggactttactccagtgcatgacctactgcagtcacccgctgagggctgcattgctagacctggtcgtcacaaagaatcaaccatctcctcgcttggtgaacaacaagccaaggatgatgtccgttacaccactaatggcaggcgtgtggatcctatcacccagcgcagtagcccagagcttggtgacttcggttctctttgggagcttctcaatgaggtcgctactcctgcaagtgtcacaccaactttagggtccgcaaagaccaccaagtccgagctggaatcgctcgatgaatttcttgctagtttagcggaaagacccacgaagagggtctcattcactggcctctttgacattgaaacatccattcccgtttcatacaacacccgtcgcaccatcaatgagccaaatcctcgggtcctcaaagacaccgccactggctacgctttccattcttcttctcggcctgaaacgcacgcgacaggtattcctaccaatctcgagagtccaccattcactatcttaaagcggacctcggttattgagccttctggaacgagtgccaatgtgaaatttggtgtcccacgaacacccccgaagatgattgccagagccatagttggtagtccaagtgatacacccacggcgaaatccaagtctcggtcaggcagaaaaagacccggaaggaacgcccgcaattgcccagtcacttctgaagaaagtgctgggctagaatcggacacaagcgttgtatttgatcattccgtttctgatagatctttggctatctttgtcccatctcaagtgcgtacacctggagcgaagactcaccgttatgataccccaccgtcgtcatttgacgatcatgactggatactgaatgacgatgccatgcgaggacttggttttggaggtactcatgtgcagcctacccgacagctatcagccgcggagcgaagaatcgccctgatgagcagactcctcgtccactttcctgattacgccaaagtcgtgtctcaaatgggactggctttggagtatcgtcccgataatgatattagctcacgtcctattcatgtctttgttgacatgtcaaacgtatgttttagtcccccctctacccaacttttctcaagctaactcacctcagatcatggttggatttcacgattcagtgaaagcctcgcggaacatccctccctcgacccggattcctcgtgcccacatgtccttcgccaacctcgcattgatcatggaacgcggccgtcaggccgccaagagggtcttggtcggctcggaccatcttccctccgtcgatgaagctgagagactcggctacgaagcgtgcatcctcgaacgtgtgcacaaggtgaagtcgatcacaccccgtcgcaccatcaaatcgcagaagtatgcctccagcttccagggtggatctagcggtcctgaaacggtcgccacctctggagagcgatgggttgagcagggtgtggacgaaattctacacctgaagatcctggagagcattttagatacggtccacccggctacgattgttttggccacgggggatgcggcagtggccgagttctccggcggtttcatgaagatggttgagcgcgggcttcagcgcggctggaatgttgagcttgtcagcttttcccagggcactagcaacgcgtatcggaagaaggacttccgcattcggtggggagaccagttcaagctggttgagctagaccggtacctggaggaactgtttgagtgaatggcgaagcctgactccgttgttaaacggagatttactttgctatttcaattttaaatgcaatcacgacacctttgttagtaatgactcaaattccttgaatctgtgactcgagtcgtttaatgtagctcatagtcgtatactccggattgagtcaactccccgccaaaccgccagacgtcattgggcggaaaacacccgcccgcacttgttgcctcatgcacgctcgtctacctaaacgactctccgttctggaactatatagtctctgttgatccgtgctactctccagtattgtttgtcttcttctatattgtcgaacttcaggcaaaagaggaacagagaaaaaacccgcaatttctctcgaagaatttggatttgctcctgcacaaccagcagaacgtccttgcaaaaagaaagaaaagaaaaaagatcaaaaaagatcaaaatcggccttacaatcaaaacatatcaaatccaccatgtctcaattcacagagcaagagttcttcggcggagccattcgaggcgtcgtgccacaaggctggattgattcgaggtcagtatacaactctccaatgcatcaagttcccattttatcactccaatccattcccaataccatcccagaacatcccaatcaaaaagaaccccgaaactaacacccaatccagcactctccgcgaggtccccgaccaccaagagctatggctctcaccaaccactctctccaacctaatcatcgaaatcaaccagcgcgtcccacaagacgaagctctcagcacctttgccacgctcaaccagcaactcaccgccgccccaggcagcggtagcgctgcacccgcaacgacagaaactgtcgaccaagccgccgccctgcaccacctacacgatctctgcgacgaaggcgacaccatgcaggtgatcaagtcgcccacgcgcgtcgacgtccagcttgcttcttcctcgcctaccccttccggtgtccgggcgtatcgcggcattgtgtccttcacgacgccggtgcgcggcggcggtggacgcatccctgcgtcggctgaggggtctgctgctggtgttgcggatgccggaatgttgggcgcgcaggtggatgaggtttctaatggtttgccgcaggtttcgaggttgacgtgccatttcttgattgttagacttgaggcgcaggatacggatttgttggtcttctttaatgtgcctcatgaggagtttgataagactggggatcctaatgggttgtctgttgaggaggttcttgctgaagagactattggggctttgactgggagattgcagatttgtgattggggtctatttgtttaggtcttatggacttggatttagacggcagattgggactgagcttggggagatatggttgtgatagctgggatttgggacagacaagtgccatttgcgctttgagacgagtagataaaaaatgaaacattgacttccaagcttatcttgtatgttaaaggaccaccagtgctttaatctatacataaatcaaaggttgtattgtggtatagtgctatctagtaaagttctatagatctagccatttcatagtcggcgactctcatatatccatcggcattgcagtccattctgttgattcgtcagactcttcagaaacacaccgttcacattggcacacaaaacggaaagattttcgaagatgctcgcgacgcgaagtaatatccgtatattgtgtcaggtcgaagtacgagatgcaacattcctcgcccggaaaaatatcgcgggaggcggtgaagaccatgcggcctttatcgtcggctttatggatgatctagtggtgacttagcattacactcacacatttacacctcgggaaagaattccacttacatttggcaaacatgaatgattagctatagccgcagtggggtaaacagcagcggcatattgctcccctctatcgaccggaggatttggcagggggaaatggcctgtttcgcgtgggtaaagaccaaatgagtttgcttcttcctgacaaatgagatgaagaacacgatctgcactcatctcatggggaagagcgggattactccggagatacttcttcacaagaacagaccaagaccggacctcgtcatgaggccaagtatcctcagaaccacagagcgactcaataccactccatccatgcttccaatgccttgtcgactcaacgacaccaagcgctgtccgtccatgcaattgacaatgtcgcgcagcaagtagccgaagaatgagccacagcatgccgaaatcatattcactcctttttgaccggatagtgcccgcataccgtttgagccaagcacattcaaatccatgtcgaagactatcagcgtcacgacatgtgctaccgcaccacgtcacatccggtatacaggcattcggacatggactccgggcatggcgaggcgccggccgattacatgcaggattgctgcagatgagattgtcgttggtagcgggttcgtcgacgaccgggatgactgcgtacggggaatcgacgaggagacaggcgcctttggggacgggaccggagacgcggaattggcggcctttgatcgcgtcggtgctttcgattagctgtgggtggatccaatcgggctgcgtctgggtgattcctgttacatgaatccggtccgagggttccgtggtgatatatacgacttgagacatggttgggttgggtactttgggggaatgtctaggtctgttttgggggtttgtttaacgtcggtttcgacggcaaattcttttgcgcgtccattattgcgcaggttttggttcctggcctgtgggtcgtttgattcgcctcccggatgtaagggcaatgaagttatccaagcgactacgagtgattggggtcccacacacgggcatagatttgttgactttattggctgatctgtatttttagcggagtagcttaattgatccactttagatgaggtagtgcgtagatgatagtagcatgttatataactagcttctctgtaaaggccttatcaaatgtcacagcagattgaaagtacggtatggcaacaatgactgaaccaggatacaggttgaaggtacatgtatgtgagatctcaatgcacctacagccacgattcggtaggtgttgaacaccaccttgacatcgacacccttgtaactaagtttaaaaggtagtagctgtataatctagaaatataggtatgtagtatacatttgagttcatcttagcttcacctgataatgactagtcactgaccctgcggagaagggtgagctcgtcgtcagtgctagctaactatatactaaggataaggtaaggatagacatgtatatcagaaacttccaactccccccctacgccctcgcctggctcagcatatctgccgagcactcgtcggctggctgaaactcctgaagctcgatggcattgcccccatccccatcctccaccaccccatatccaacgcggaaaggcagctgataaaaccaaaacaattgaaaaaaaaggcttaggccatcagggatggccataatcaagaagaagaaaaagatttgtgatatgttcaacaggctaattcatccgttgtccatcgtcaaggttggtccacgatgatgattcattgtatgcgcccgctgtggtgttcggctgctgttggttgatgtctgggcggacgagccagccaccagagtagtatgatgtactgaatatggtggtggaggacattggttgtagtacatggcggaggtctttcatatccaggacagagcctccgacctctatcccatgggcactacaaagattttacttttttttcttctcttttcttcaggaagtgtgaaggaagggttcaagctaacttggatgaatggtaaagcttcgtcctttgatgttgattgtgttggcctgtttcacacactgccacctcgttcgacatggtaataaacccgcttgctttgacaatatgtccaacgtgtgtaaagcgatgattattccattgtgatggtgtgtgtgagaggaggagaagagaggaagagggaaagagggaaaggccaataaatagtctacgtagctggatgaagctctaaaagaggagtctcgaatatggtcctaatgttctgggagttctaagctatatgccattgatcgcactacctgccttatactacaatttacttcaaggcatgcaagcccctctctcgcaactcccagcggatatgggcccgccccgagcgcgttcgcagagaatatataggcaacacctgcacaatataggttctttgcgatgtgttgtctctcatatctcgttacttggctctcaaattcgtactttccgcctctttggtgcaccatctcaaatgcgcaaagatcctccaatatacatcctcggccgcatcctttcctacaataggatcaagatgcccgtacccctcgactaggaacctgcgatacagtctctcgccgaatcgacgtcgcagcaactcgtagtccttgagcgtagactcaggactgaaaacttggttctccgtacccgagacaaagagaatcggcaacccttgtagtcgctgcaaattctcatctgtcagaagaggacatgaatcattatccatgcaaatcccccgagttcccatgcgaaccacgtgtttcataagcttcgtatgtgtccccgcgaaaaattggtgaacattgtcatgcagactcatatcaaggttctcgtgattccatagtagcccaaaagcaaaagatgtccggtggcacgccgtagacgtgcagatgtcccgcgtgtgtccaacaggatagagacgaaggagcgtatcgagtaatcgttggaaaagaacactcttagcactgctgacaatcgggaagtaattcccagccagtaattcgtagaactggatcagcagagtcgttctccccttgagggagttccagtacccaaagacctgattcatgaagactgagttggcagtaacgccgagaagttggctactttggatggttccatccagcaggcccatgcagagagccaccgagccttggcaatgggctaccacatagggcttctgtcgctctttgtcgcgaatatatgctattgcagcagcaacgtcaagacggcagtcgaagactgtgcttttctgcgcaaccgcgggatcacagccccagcgaggggtgagtgcgtagcatcggtgtccacgctgtgtgagatactcaaccatgttgcagcgcaaaaatggcagtgaatacaaattgtgcatcgcgccgatcccagtgactccgggtagaagtaggactggtgcaagattgcagttaggtcctggctcgcctgtcttttgtgcagggagtgggtcatatatatcaagatgtatctgaacgctatcgcttgcggtgacattgcacgaggtagaaggtggttgttttacatcggtgcctttagttgagatctgagggaagcgcatgcggacgaaagggcgaacgaagaacaaactgatgtggtaaataaaagaaaccaaaaaccacaccaaggccaagataagactgatctggaagtcttttgtcgtccgaaatgtccgcatctgcttttggaagtctagcaatgagatatgaagggcccctgctccaatagttgtcccgtccagtcgagtgatattgacattcaccgtagttgtcgcttcccaggtctttctggcggaaaatgctatgtttgagttgatcagcttgtggcctttcaggcggtactctatgccctctaccgatagcagcttcaggtgatatgatatagctgatgattcggcattctcctctattggcgtgaaaaagtctaccgttccttcgacaatcttgagcgtggctctagataatgcgtaacaagaaatcgtcccggtgcatattccttggtattgtgaatctgtacatgtgagcattctactgccagagtgctctctcgactctcggtttctcacctcggcagatttcgatcgtaagaaacatccgcatcgcgcaagatgagccttttcctaccctctcagaaagcgcaaaacttccgttatccgaccgcatgctgatgtgcccatgcatagtctctgtgaattgccatcctatcgactgcgatgttttctcggtactgtcttgatggtcttggaaatcgcacgatatactaggcttgcagtaggcgtttaaagtctgattttcagtctcaatatcaattgataatccagatctctcggtaatcaaactgacggatcgctcggagagggctgatattgtgccgagtgggttcacgcctatcagaatcagcacatagtaagccataaatttttacttgcaacatacccagggctgtcgggatgatagatgcatcacagcacacgaggcctttgtatacttcaccattagagccactgaaaacctctcctagatgatttgtcacacccccatgccctgttccatcgttgctcatgttggctcctccaaggagatggactgtggtttcctcctggtgacgacctttggctatgtttagcgcagctttgttatggcttttatcgattgttaccgtaaaaataggaaaaccccatccttgagcctgtgcgagcaaaactctcattgaaaatgttctttatccatttgaaatgctcagatcgcccttctcccggtccccggaggtacaatcgatcatccttcaagatcaaagttatctcgttgctgtcatgagacatcaccagataagttgaagtccgctgaagagctccattgtatgcatacggaccgaatagcagagacttgagagaggcaagggtcttcttagcttcttggcgagggttccaaagacaacacagcgcctggctcttcatagtttgcagggtgagcatgatttggattaccgggttgaacatcgcaggaatgcaaccatcttggataacatatccagaaagaggattgtccagaggatcaacgactcggttatcaataacagcagtgattgttgttccagggggagcacgcgaggattcaccggcgatccctttgatattagcatatccgttgtaaccttgaatctgtaaatcaaatgtgctcggactgatattctggggaagtacgtaccaaatatcaaaaagtccccatttccagagagattccttccaacaagcggtgacatatggaggccgtgctgctttgaccgaagcaagacttcagtagttcctagagcgccagccccaagaaaacagaactccttctgtgattgaagtagaaagagtgagttgatatgtccacttccgaagtgaattcgatacttactgctttgacccaaaagagttgttccttgaaatgatccgcaaacactggcctcccacttccatgccaagcaaagtgtatagtgtagcctcctccgtccatattttctacaaatcgaacttcgcatccgcagaacatctcagctccccaattccaggcatctgcaagatatgttgtcgccaccgagttctttgacccatcgttgagaccagtgcactcatggcctgattgtctgtttgcctgcatagggacacctgcattgttgcagccattgtggaaaaatatagtcaacggtactcgatagaaattattcctctttcctagccatctcaactcttcttggagatgcttgagtttgtttgggcttaaatcatccgggtatgtggaaggctgtagcattgtttcggcgcgtgcgtagtctgcattggttattatgaaatgttctccaccatgcatataaaactcacattcgtcgagcgcagatggctggtccctgatctctgacggccatggactcatctgcaatgttctcctatccgctttcaggaaaaccccggcattgatcaatgaagatcctccaagtcctatgcaatatagaaaaaggctgtcaggtttccctaatcatcaattctagggagatgttgagtatcacataccatgagcagcaaacgaatgctgtccatcgcctaagaatacttggaaaagccgcgtggggtctccaggcgacagccactttgaaatgaaggagccctttacagaactccccgagatgctcgtgttcttaagacattgagagaacgtttgtggaaatgaaccggcttatgggaatgttagcgatggtatttgcttgacgctctcgatccgtacatcttctttcccagccaagctctagcactgcgacgctcttccctgctcgggccattcgacttgccgctactccagcaccatagccagatcctattaccacgacatcatattccggcctcattgatctgaacggacgactcaggttcgggtaattgtccgtcctgtctgtgaaatttgacattgtctctcgctttgagtggaaaatgaatccttagagacacagaaaacaagaaaccgacatatacgtttttgggatgattaggccgatataagcacataagcactaggattcgaagagtaaggattgacacgtattttgcacgataacgcggacaagtagaaattgtcgcatccgaaataggcatggatgagccctgagctggacaacgcctattggctatatttgtcgagttattcttagtccggggtaatctcgtgttgacaagcaagttagcatgaagcccaattcaaaattcacatgatatgacattatttccaactccaaagaggtaatcctgattgtagatccggacaagtgcttatcgaatacgtgctcactgagtaactagttagcctaggggtgagtagtctgcatcgctagtcctatcacgtgcagccctccacttctacaaggcattaatgtaaacaatgcaaaccagaactaatgacccctccatgcatatgctcggtgacttcaaacaccaaggcaccagctgattccaccttccttagctatcgacctaaaaatatgctaccagacgattcagaatgtggggtactcgaacgcgtacaattgacgccttcgatgataccaaaatctcccaattttgacgtcaaagattcccaattcttcagaaaattcaccaagttaccctcaccggaagaagttcgcttgcaggccaaagcccaacatctcgcagaagtctgtccagataatagaaaaaccttctcgatgactggctttaattaccgaacaccacctgtgatattcgaggatctggggctgtttgtcaaatggggaggcattgtgagaacttccgagggtcagtgcctctatgctctcggccagctccttaaagatgatatcccgattccggagatatacgggtggcgggaggatggcggtgaaactttcctttatatggagtatttacaggggcagactctggagcaagtgtgggataatctgggacctgataaccgcgtttcgatctgttatgagctccggacaatcgtcaaccacattcgccgccttcaacagaagccaggagagtcattcgtgggtacgatgctcttaacggcctctttatttcctaaactgcatccataactctttctccacatttaggtgatattgcacaagatcatctatatgatagagtattcgaagtcgagtcgcccgaagcaggaccgttcaataccgtccgggaattccatgactggttcactttcctacatcgaagaccaatgccagatccatatattgtcccaatcgaaccgttccgtcaggacctgcctgatgacagtgaaattaaatttacgcatagcgatctccaccgaagcaacattttgataacacgctctgaaccctatcgtgttcttgcagtcgtcgactgggaacagtctggctggctacctatatactgggaggccagaaaggcgcagtatactgctgacactcaggaatggtctaaaaaatatttgccaatgattttatgtcagtataccagcacttgggatacgtgggcctactacactgcggccctgggagtttgagatgttgagaaaggcagagtcttattgttctggcttttattgatctcttttctgcacaagataaacggcgtcgaaatatcacccagagacagtgtttgttaaatgtgattggtttttagctcaccaccaggtattaggtctaccgcaagtctctcttcatttttccttcctgcttctgatgtgatgttatttcaacgaccaagcaataagttttagtatcttttttcgtgtcttcgtagatccgccggccgagattgatactatccggaagatggtagcgggccataatgccttcttgaccatgccccctttccggaataccccatggtcgatttcaacgataccgagcccttattatcgctcgcattccctactctctttccacgtggggcagctgagttcgtgacacctcgcttgagagccgtgcgatagagtgacgatatactacaccttaccttatgaaacacgagagcggccgctttgtacagcatctacgattccgctatgtggtattcaataccatgtagcggcggcaggcggccaagagtgcggggttctatgtcaattggcagatagactggcctaatatcacgattgaggaactgcaagatatgttcagtgaactaggtagccctatcggagagagtaccacctgggtgcaggctattatgaagtctgatggatggtgcatatactggatgttatttatatttgaatgactatataagactcatgggggaaatgcggaggatgagagggagcgcaaagactgtgctgcctattttggtggttggcctgcttgaacaggaaacgaagcagacatttgccgagatcgggaaacttccgtgctcgaaagaaagaatacagatagctccgatgacactgctgtggagtgggagtaccgttaccaactgcgtgatggaatccggtcaagatactacttgcctccgtgaatactgaggcctgtgacatttctatcgaataggctcgccagcagggcatttttgactatagacatcgcaccttgctattcccgactttactacaatgaagcacatcttcttctcccaatatcatatatacataatatacttagacctgatatcctagaaaaataattgacataggtagacattcatatgttcattaaattgggctcattgacaatcccactgccactgggcatacccaactatttacaagcataaacgggttagatatcaaggatcaataaccacaatatccttctcctcaattggcgccttaacaataggcctcttcggcgctacagccctcggcaccggcttgatctgctcaagaccgccccggcaacggccgcagaagtgacgcttggggtcaacactcttcgagtgtcgcccgactgtgaacccacagccctggaccttacaagcccatatgtatttgtggttgatctcgtaggtgtgtttggtcgtgacctcaacccggcccccgtagatagggtggccttccagtgcgcggacacatcgggcgccccattgcttgaagctggcgccgtgctgcgccgtgccctttgtccggttttcagtgaccatgatatcgaggaggtggcagtattcgtgtgtcatggtgcagaggatcttgtcctcgctgtccaggactttctcggagagctcaatggtggcataataacgccgtttctcggggtcttccacgccggatgctcctttcaggaacctttctgaacggacggttgcccggccggcggtgtttcggaaattctttgtccagatgattttgatgccgccggtttgctcggtcatgcgagtaatctggtcattgaaggcactgtcaaggtgccggaggaactcttcggcaaagccgatcttcttttggttgaattcggctacttgggctcggatctcgcgtttccgcgctgcctcggcctttttctgggccttgatggtggtgggagtacccatgccgggcgacctgtcaattgatatgatagagcgagtgagagaaaggtgaggcttcgctcgtgacggtgtcacaggtggtagctttgtatggcttaggtagggcttcgatggtaattcatcctctgactctgagctgtgagatgtagttagtatgttggccgctgccagactatgagtgcacatgaatgcccacatagaacttacttgcactgttctggctgcgtctgtgttgtagactcattgtcactgttcaggtcaagctcctcgaggtgtttgatgaggtcgctagagttgtgcaggccgaaatgaggtggagagcatgaatcaacatgcttaggtattcctgccctacggataggggatgaagatttggaactggttgcaggattcggtgtgcagtattcaggcgttgagatgactgcctttggtttctcagttgatcggtccgtctcttttaccaacttggtcatttccattgatggttcctcatctgcagtggtgttggattctgcttctgatataggtcgtcttccacgcatgagtctttttcgtggcgacctcacaggcgatggaaccgggctaggttcggcttctatgtcggctgtctcggaatccgatgtctcaaaggagctaagctcttcattgtcactgacaatgaacccgtctagtgagtcagagctatcttcttcttcaaagctgaatcctggctcctcttgttcctcttggcggtcaatcacgggctgtgtcgcggcgaaataattcactctgcttcttgtgggagcctgtgtggcaatcggccttgttggcgttgaatctggagtgcgatgtccatctgtggtgtatcctgccacatcgttctctttgtcgtaatcttcagtctctcttcggatggcggggcgtggtctccgctttgctggtaggagtaacgagttcacacgtgcgagccctagtgttctgtgcttttgctgcttttcggtagacttgtgctgtccagattcactttccgatgctgagtcgctgtcggggaatatatcgaatgatccacttgaactctttgcttgccgttgcgatttttgcggcttggtgggcatattgtgtttgactttgttcccaagattgagacatggctctccaggtggtgaactgttgtgagatttccctgtgcgtgggacagtctcattgtatggcgtgtttttgactagaggattggctgtattgacccttgccatgatcgcgatgttgttctgatggcacaatcttcgtggtgttaatcggttaatgatatcctataggtgctaatggcgatgatgatgatttctctaaattagttgaactgtgtttgcgctgaccaggtcagtgccggagaccccggtgtttttcgttgttggtgtcatgtctgttcagctgtcaacgaattcgttggcacggcaacgtatgtacccagccaggccccaactcttggcaaatcgggaaacctcgatcctttcctatttgtcggaggctgaacatggcactgatccgatagtcgctatatcacattcgcataacccattgggactttggtgttgtattgtagacaggcccctgcgcctctgctagagccgcaacagcaaggaaacattgccaacaaacaaaggcgtgttgagcaggtggtgcgttttgctttcatcagtgttcagtcaacagttactacaatcgccgcggtagcctattaaaatgtactctagtctcctacaacaaatgttgcaaagtaggaactacatcgccttcgctatgaatcgatcttcacacttgttcatttcgatacatatgtgacttccggattctccattactatgatgattgtaattcttccatacggatttgaagattcacgcgaataatagaagaactttcgacggatattttcttccagggtacattgagtgtgcttcgctgttcaccaagtccatccagttaaatccttgacccagtccgtcttcggagatggcttagccaaacgaaacagaacgtagtacttgtcatgccactcttcgtttgcatcagtacggcctgcgcgtgaaaaccccgagaaatgcctaattctgtcagcttatagtgctctccattcaacaacggataaagcgtacatattcccggtggccttttcatagatgatcttcgacatagttgacatacgcggtagataaccgtgcttcttcagctttctaattttcatgtcaattgaaagcacgccaggcagagagttctgtagacttacggaaaggcttcacgaaatttatcgcggatctctcggcgcgactcaatttctagcccccagaattcttcttccctgagagactccctgggaactttgtcccagaccaaataagtgatgtactccggaacgatactatcttcgccttgctctctctcttggtaagcaaggaggtcagggacaacattgcatccatatttattgagcactttcaaggtcgtcaactcaacgtgcggttgtggcttagcagcctgcttttgtcgaatttgagggctctgatattgagtgccaatgactggaatttgaaaataaatccgcataaaagctttcttgctaggatttcctttggggggcagagaaacttagcagctgcgtacggaagtccaaggccatcgtcaacgtcttgctgcgtcatccattcagaccgttcagagagcgtcttatcgatcacccaggtctggcggggcaggtggagaggcggctcggatggtggatcgagagtgatggccgtgccgtcgaggccgcacaggagctcggcggtttcgggattgtccatgctgacttgataagctttgcaacgatggatgaagacgtatttttggtcaatgaaaggttagtacagctggtgtttgaacgagagtgaaggaaacgacagttgttgatgggaaatgcaaagcgtagacctcctcgagctctggtagactgggtgttagggttttggcacccacaacagcttaataataagcaagcagtccacaatggttattccaatccttcttgtactctctaaggaagtgtcaaataatggctggactaccggtgagattagcctacgttggctacaaaggcactttattccacatacgaatttgatggccacggtagctaccttacgccctaattcgaccgaatctactccgtattccgtatacatcgatattatacctccactgcgaatcgttatacaacactgcattgcttgtacaggagaacatgaatctacgcatggcaaatgagaggagcgttaagaagcgcgctcggtcaactagacagaataccatgcgaggaaggtttaaccattaaaaatggcctgcagctagttgcgcagttagatttacccaataagtagcccggactggaatctacttagtaggtctcattaggcacttagaatagaaaagcccacctcgtaggggaaatatggtacgtatctacaccatctccgagtgtgtagtgcattagttcattaatatggcattatggtactcctaccgtatttgtcgtgtcatccacaacactactccaaacaaggctccaatattctttagggaaagaaaagtttgatggttgttaaccttagaagttgtggttgattatatatcggatgcaaccatgacgaaatatataactacattgacagcaaaaacaccaagacaaagtctatttatatgactgtatatactgatctaatatacgttatgtataatgagatcaagtatggcaaccataactcaaacatacaatggatgaagctgtacttccacatagaatctataatgtagaaagatatgcctcctgtctacattgagaattaataaatctgataacaaggtagccatggttattatagcctatttacatataacatacaaggactaataagcgtcaactaatgatcctagatgggtgaaacccagtcccaaagccaaaaccgccgaccgaacaataaaaccatagaagggagagcggaccaaaaccaagccaactgcagctctatgacgtccaatcataaccagcacgacgagaacccgaagaccagacgtgcccaagtcttcaaaggtctcaggtactatcaagccggcctccttgctacaggtacatgatgttctacacggaatggatgtacttccggagcatgcggatcgcaaacggagaagccacattataccgcatggcttgcaactgaggttgggctcctggacggctggacggacctggatcgacacgggcagatggacgttgaccagccattccatcgctctgccgatagagatcggcggccccttgcatcccagcacatagtggatatgcctgactcgttgcaatctgatcggatatagcctccgattggtgagaggatgtgccagttgttcgcatttgtagattgacatcactggtgaacattcctggctctacttcggctggagatgggtagtaatcggttatttgtttagattattcggtgcgagatggcttcgatagaaggctagtgcaaataatgtggcttggatattaaaaatagaggaaataaatgatttacagagagagagctctccatatgggagatgaccatctggagtcctcgggttgatttgttctgctagccttaaggaatatattgtagaactacactatgaaagagagtatactaaaagtaagagacgaagtaataggtacacgctgtactagcacacattgttgagtgccactctacgtgctcatatcatgcgattgcgagcgaaaacgccgcaacagacacaaatttgaatgttgaatcaaacactgagataagacaatatttgagcaataattggcgcttgatagacatgtctcactatcagggatacagcataaagtgatgttgttgctttttgaaatttttgatctaagtacttctagttgtatatatatcgtgagcgagattgcacaaccatattcgaggactggcggagatagcataaaccatgccataaagccataacaccgtactacaatgtaatacctgctaggggcaaaagtataccctgtagtcatatgttaagttctttatgtgaaaggcgggaatcctgattgcttgtttgaactcccatggcattcgattggctacaatagtacatactaattcaaaactccgtattccgtactccatttcgtgcatagacgttgttgtacaagtcatgtggtgcggcaagcttttcaacagaaattatccagtactgttgtacctgtacggaggactccatatatggacacaactacggcctcaaaaataggggctgtgattggctcctggtcatgacgcagacggcggtggaggataacggcgcagaggggcccgggtcacagccccctaattataaattgaatcagtgctcaaggtgcggtcaactcgactcctatgtataactatgataatcattagaggtgccttataaatcaatggatctactgtagagatcgaaaccctttcacggggagccagtgcgaacattgaatataaaacgccctattcaggggccagagccaaaaataatcatggaagcgcttgtatggttctagaaaggccaatgccatggctcccctatgtactccgtaggtccaagtaaactattttctaattaataggggtacgataaataaccctgaatcatttgcttatatttagccacattgaagcgctgtcgtgctagtgtagtgtacacagtattgaaaggtgacgggtcaatacgccacaatcagtacaataaatgtgcgacactagggcacgcctaccggctaatgatcgctgactaggccctttaagaccgatttcgccgaagattatttttggtgcttattatataggagtgcaatccaatcgctatcggcttcttgagagtgtaattgattatagggtcaataaaggccacggtaagtggatagatagcgaaaacccacaggggaaaacgaagatcagatgtcgaagatcggtgcttatgcagctgatgtgtcgttcctgtacctgcctccactaatatgaaagtgtacaaggtacaagtactcaaagtaatactgcagtctgcgagtatatatgtgctacggcatacccgataagcattggcttgcttgtgcagtggcgttggtattgcgtacaactaacatacggaggatggagtacaatattttatggagtagacttctgggtcgaggcttgaaagaatcattaagaaaaaggaatcggtgatccacttgtgtggacaagatgaaatcccgagtctaacggtggagatcttggaataccagttctaagatacagcggtatgcatagagtctcaggtgtattggtacatctatatacagtacacagctgtgttatattgatgtatctgtgacagactatctagattgcacagaggctaatgcatcgataaccttggaagactaaaaagataaatatagtcaatgacgattgagttttcaaacgttatttagcgagtggtggaagatcaaacaaggctagcaaaggctgtactgccaggttttctcgtggtacaggatccaccgataacatccactatggcctccgtacgggggagtacatgtatgggcttgccagccacagaataaccggcagtggaaagtcaaatgtaatacacatgggactgatcgaccagatttgagacaacttgtattgcggtggcaaatcagcaaacaccacaacataaaaaaaagattcactagttatgaaagcagcaatttgaatagaagatccagattcaacaacagaagatatacaataagcagtctggtagcaaaggtggttcttgtcgcgggggatccatggaacggcagctgaggacacgaaggccacgggtcagagctcaagctgatattaattttatttgagcttcgaatcagattgaagaacatcaggagataataataaacggaatgtaaaatatgcaaattactagttcacttgtatggtccttagttgctactggtcacaaattccagaggcactgactcgccacataagcagatagataagtgtacgtacccgtacctaggtacaatatgtacgcagtacgcagcccgtacattgtggcgaacactgtgagaggcaagtctgaaaatggacgccctctacatagtaggaatggaaattgccggtgcaacgccatccctacataccaagtatagtcaccatagcagagtcgacgaatcaagggcatttttggaacaacaccaggtatctctgaaaatagcttccggccacattatttgttaccggattacatgctggctgggtcgcggtggggcaagtttcaggggccgtcgagactcccttggattccgagtgtccatgggagattgtcattggatggtgagaggggagattggggaaaggtgaaaagtgatcggggaaaaaacaacagcgtaattacagacggacgatatcggtaattcacaaatggtcgatcagcgagagacacagagagagagaaagggaaaggcgtttggtgaatacaaaatacctgggagcgccaataggctgaacttaatgcgccacgtacggtaaacaaaggggggggttgacagtacctgggacaaataggggctaaccatactgggagcaggtatccagtacctgcaactctgacacgtaccctttatagctgtaagatgacggtaaattactctggagacggagccagttcccccccgacccaaaaataacaagcattttctggtcttccctttccaacccccttccattcgctttttgtttccatctttccttctaatttgctatctttcttgttctttctttttgaaggataggagggaggttgctttgctcttcaaacgttcccattgcaccttcctttgcgtgaaactctcacctgccattcgttacggagtctgagactcgttcgacaccttcgcttgggtactcaagataacgcatttctttcctgcgcttgcttcgactttctacccatgctctattagttcgacaacccgaacaaaagaaaataatactttgaatggtctccgaggtgagataggcttgagcttgcatcattattgagctgggcagctaatcccccgcagagctttgagcaataaatcaatcgcgactcgcttgtcatgtcgggctacgcaggcggaggccagtacgacgatggctatgcccacgggcaggcacatggtcaagctcatggggatgctcatggtgactcgtactaccaggacgaacatgcacagggttattatgacaaccaagggtatggcgatggctactacgatcaagggtataaccacccccacatcagaaaatggagtcatgggctgacaagactagtaatggctactacggagcagacggtgttcacgccgacggagctcctggggatcatgcagctcacgcggatgcaggccacggatacgccgacggcggatactacgaggctgggcatatagatccccacgccgcagaaccgtactacgaccagggacaaggggaaccccgaggccgtcgtggtcatgattccgaggaggattccgagaccttcagcgatttcaccatgaggtccgagactgctcgggctgcggacatggactactatggccgtggagacgagcggtacaacagctactcagacagccagtacggcggtgctggtggataccgtcctccttcctctcaagtttcctacggtgccaaccgatcatctggcgcttcaactcctgtctacggaatggattacggcaacgccattcccgccggccagcgctcgcgtgagccttacccggcctggacttcggaggcccagatccctctctcaaaggaggagctcgaggatatcttcttggatctggtcaataagtttggattccagcgagacagcatgcgcaacatgtatgaccacatgatgactattctggactctcgtgcctcgcgtatgacccccaaccaggcacttctctccgttcacgccgactacatcggcggccagaacgctaattatcgccgatggtactttgccgcccatctcgatctcgatgatgcggtcggtttcgccaacatgaagctcggcaaggcagaccgcaagacgcggaaggctcgcagggctgcagccaaggccgccaaagctaaccccgaggacgaagaggaaacgctcgaggctttggaaggagacaacagcttggaagctgcggaataccgctggaagtctcgcatgaaccggatgtcccagcacgaccgggcccgccaagttgccctctatcttctgatctggggtgaagccaaccaggtgcgattcctgccggagtgtatctgtttcatcttcaagtgtgccgacgattactacacttcgcccgaatgccaggcgcgcgttgaaccggtggaggaattcacctacctcaatgagatcatcactcctctctaccattactgtcgagaccagggatatgaaatcatggacggcaagtatgttcgtcgtgagctcgatcacaacaacatcattggttacgatgacatgaaccaactgttctggtacccggagggtatcgagcgcatcgggtttgaggataagacccgcctggtcgatattcctatctctgaaagatggcccaagttgaaggatgtggtctggaagaatgccttcttcaagactttcaaggaaactcgctcctggttccacatgatcacgaacttcaaccgtatctgggttatccacctgggtgccttctggttcttcactgcctacaacgctccaactctgtataccatcaactaccaacaacaggtggacaacaagccaccgacggctaaatacctcggcgctgtcggtttcggtggtgctcttgtctccttcattcagattctagctaccatttgtgaatggatgtacgttccccgacggtgggctggagcgcagcacctgcacaaacggttcatgttcctcattgtcatgttcattatcaacctggctcctggaatcgtcatcttcgccatcttgcccatgctgaaaatgtcaaccaagacagaaaacggcatcggcctcgccatcggtattgtccactttgttatcgcagtcctgacagccactttcttcgcaatccagcccttgggtgcgcttttcggcaattacatgaagaaaggtggacgccaatacgttgccagtcagaccttcacggctagtttctatcgtctttcaggtaacgacatgtggatgtcatacggcctctgggtctgtgtgttcggtgccaagttggcggaatcctacttcttcttgacgctatctttcaaggatcccatccgcatcttgtccccaatgcagatccaccagtgtactggcgcgcaatacattggcaacaccctttgccaccgacagcctcagattcttctgggcttgatggctttcatggacttgacacttttcttcctggatagttacttgtggtacattatttgcaacacaatcttctctgtggcgcgatcattctatttgggtgtgtcaatttggtcaccgtggagaaacatcttctcccgcctgccgaagcgtatctactccaaggtgcttgccactaccgacatggagatcaaatacaagcccaaggtcttgatctcgcaagtttggaatgcgattatcatctccatgtaccgtgagcatcttctcgccatcgaccatgtgcagaagctgctttaccaccaggttccctccgagcaggaaggaaagcgcaccctccgcgccccaaccttcttcgtgtcacaggaagatcaatctttcaagactgagttcttcccacagggtagtgaggccgagcgtcgtatttcgttcttcgcccaatcgctcgctacacccatgcccgagcctcttcccgttgacaacatgcccactttcacggtcatgattccccactacagtgaaaagatccttttgtcgctccgcgagattatccgtgaagatgagccttactcgcgtgtcactttgctggaatacctcaagcaattgcaccctcacgagtgggattgcttcgtcaaggataccaagatcctcgccgatgagacttcgcagttcaacggtgataatgagaagcccgagaaagacgctgccaagagcaaggttgatgacctgcctttctactgcattggtttcaagtccgccgctcccgaatataccctccgcaccagaatctgggcttccctccgatcccagaccttgtacaggactatttctggcttcatgaattacagccgtgctatcaagctgctttaccgtgtcgaaaacccggaggttgtccaaatgtttggtggtaactcggagaaactcgagcgcgagctcgagcgcatggctcgccgcaagttccgtatctgtgtctccatgcagcgttacgccaagttcagcaaggacgaacgtgaaaacaccgaattcttgctccgcgcttaccccgacctgcagattgcatacttggatgaggagccacctctcaatgaaggcgacgagccccgtatctactcggctttgatcgatggtcactgtgaaattctcgagaacaacttgcggaagcccaagttcagaattcagctttctggaaaccccattctcggtgacggaaagtccgacaaccagaaccattgcatcatcttctaccgtggtgaatacatccagcttattgacgccaatcaagacaactacttggaagaatgtttgaagattcgcagtgtcctggccgagttcgaggaactgaccactgataatgtttctccatacacccctggaattgcctcgcctgacgagaaccccgttgccattttgggagcccgtgaatacattttctccgagagcgtcggtgttctcggtgatgttgccgcctccaaggaacaaacgttcggtactcttttcgctcgtacactggctcaaatcggtggtaagcttcactatggtcatcctgatttcttgaatgccactttcatgacgactcgtggtggtgtctccaaagcccagaaaggattgcacttgaacgaggatatttacgctggtatgactgctgttctccgaggaggtcgcatcaagcattgtgaatattatcagtgtggtaagggtcgtgatcttggtttcggatccgttctcaacttcaccacgaagattggtactggtatgggtgaacagatgctttcccgagagtactactatctcggtacccagctgcccctcgatcgcttcctctcattctactatgctcaccctggtttccatctgaacaacatgttcattatgttgtctgtgcaaatgttcatgtttgtcctgatcaaccttggcgccctgaagcacgagaccatcatgtgccgttacaactccgacctgcctattaccgatcctcttgtgcctactctctgcgccaacctgattccaatcctcaactgggtgaaccgctgtgttatctccattttcattgtgttcttcatctcatgggttcctcttgcagtccaagagctgacggagagaggagtgtggcgcatggctactcgtctgggcaagcatttcggttcgttctcgttcatgttcgaggtgttcgtttgtcagatctacgccaacgccgtgcacgccaacttgtctttcggtggtgcgcgatacattggtaccggtcgtggtttcgcaacggctcgtatcccattcggtgtcctctactcacgattcgctgggccttcaatttacctgggcgctcgcctcctgctgatgctgttgttcagtaccacaacggtctggactcccgctctgatctggttctgggtttccctactcgcgctgagcatttcgcctttcctgttcaacccccaccagtttgcctggaccgacttcttcatcgactaccgcgactacatccgctggctttctcgcggtaactcccgatcccatgcttcctcttggatcggtttctgtcgcctttcgcgtactcgtatcactggttacaagcggaaagtgcttggtgttccatcggagaaaggctccggtgatattcctagggcgcgaatcaccaacattttcttcgccgaaattgttacgcctctgcttggtgttctggcaacaggaatcccgtacctatacatcaactcgcggacaatgtattctgatgatcccaagtgggctgcgaatcccatcattcgccttgcgattattgcttttgcccccgtcggtatcaatgccggcgtcgcgggtatgttcttcggcatggcttgctgtatgggcccattgtttggcatgtgctgcaagaagttcggtgctgtccttgctgctattgcccatgccatcgctgtgattatcttcctcatcatcttcctggccatgttcttcctggaatccctcagctggccccgaaccatctctggcatgatcgctgctatggctctccagcgcttcctctacaaggtgatcattgccctcgctctgacccgtgaattcaagaacgatcaatccaatattgcatggtggaccggaaaatggtacggcatgggttggcactccctttctcagcctggacgtgagttcctgtgcaaaatcactgaacttggttatttcgccaacgatttcttccttggccatgttctcctgtttgccatgctcccggccctcgccattccctatgtcgacaccttccattcggtcatcctgttttggctgcgcccaaggtatgtagctcctcatctccacactacgaaaactctgtactaacgaagcatgcttctagctctcaaattcgccctcctatctactctctcaagcagtccaagcttcgcaagagacgcgttgttcgcttcgccattctctacttcttcacgctcttcatcttcctcattattatcattgcgcctattgtgctgcgaaatacgaagcaattggatagcatcttgtccggcggcatctgggacagcctgggtgtctctaagccgtcttcgattggtcttctgcaaccacttgatcacggactcaatgacaccgtctcctggtacactggctctaatatccccaagggctacacctcaggcagcatcccagccgcctccgagggcaccggaaagtggtccatctaatcgccttggcgaaacgacatggaaatgccttgtacaaagttatgcgtttactaaaattcgctgcatttttctgaactcaccggcgcacaatttgatattaatgaatggttgcttccaaatattgtttgtggaatgacgcttgtatgaaggggtcttccaagtcatcctcgggggtttaccttcgtttcaccagctttctttgcttgttttattttacacttctaccggaattaaattgcattgctttcaagaaaatattcttcatgttcgtaatccctaatttcacagtagaatgtccaaagaatatgcaatgcacgggtcaatagatgggtcacgtgtaccgaggttcccaacactccgagtctcccgtttcatcttccctccgttctccacgatcaagcaccactctttcgcgtctcttcttaacctatcatctctcaggtatctcgctggcctggcgtaccgcataaaccgcgctctcttcaaccctccgccatggatctccaggagacccagcgtatcctttccgaatatctgcacgaactcgcagatctattccaccgtgtgcctggctccgcaatcttcctccgctacgtgaaatccagctatcaagatgacccaattcgttctgccgtcgaacttttcctcttcctctttgccgtgcgataccttctagcgcccaagtattcgaccaaaccgggcgtggtaccactgacggaagacgagattgacgacctcgtggacgaatggaccccggagcccctggtcggggacccgacggccctggaagcgatggaagttgataagcggaccgtgattgttgggtatcgtaccccctattgcttctgcctgacgatactccgcggatattttactgacaagtggaatccggctctgtagccctgtaggcccgaaatcgaaactcaccaacggccgcactgtgatgaaccttggttccttcaatttctacaacttcaatacgaatgagtcgctcaaggaacaggctatccagacactccgtgcttatggtgtgggtccatgcggaccgcgtggtttctacggcactcaggatgttcacataaagactgaggatgatgtcgcgtcgttcttggggaccgcggcttgcattatctactcccaggccttctctaccatttctagtgttattccggccttctcgaagcgtggtgacattatcgtcgcggataaaggggttagctttgctattcgaaagggtattcagatctctcgaagcatggtccgatggtatgaacataatgacatggaggatttggagcgcgtgctcgcgaaggtcactaaggagcaggcccggaagcccctgactcgccgattcattatcaccgagggtttgtttgagtcttatggcgacatggcggacttgcccaagatcgtatgtgaacccgttacatgagattatgaattggaatgctgacaactgttgcagatcgaactacgactcaagtacaagttccgtttgattctcgatgaaacctggtcctttggtgttttgggacgcactggccgtggtatcacggagcaccagaacgtcgatgctgccgaggttgatatgattgtggggtccctggccggtccccttgttgctggtggtggcttctgtgctggttcagaggagattgttcaccaccagcgtatttcggctgctgcttataccttctctgctgcgcttcccgctcttctttcgactaccgccagtgccactatcaacatcctccagaacaaccctgagacagtgtcacaacttcgtgaacacaccaaggctatgcgggctcaattggatccccgaagcgactgggtttactgcactagcgcgcctgaaaatcctatcttggttttggtcatcaagccggaggttgtggctgctaagcgtctcacagaagatgaccagcagttcttgcttcaagatgttgtcgatgaggtatgtctacatgttttttcattttaactgaagtccatttctaatatccgcagtgtctggccaacggcgttctgattacgcggctcaagaccctcgaggacaacttccagcctaagcaggttatcccgcccgccctgaaggtgtgcgtcactaccggtctcaccaagaaagagaccgaaaaggcaggaacgattattcgacatgccattaccaaggtgatgagcaagaggaagtaatgccctcccccgccgcttagctctggtcctgaccagccattcgatgactgcccacgcctatatgacggactccatcaatttaccattctcctcagtcgacctacgccctaatgccttgtattgttactttgtcgatatacattcttattgcatcccctgcacaggcccaccattttctctttttgttggcggttgatcctatacctgtgcatggttctaagttgtttaatactacccttctgcccttggctgtttgcttcaaggatgtctattttgtatacattattcagatcaaaaccctcttcgtcccatgaatggacgctattgctatatctttcgattctttgcttcaattgttctttgctatagtagtatacactggacctcagcagcaggccagcagcctcatatctccaggccagactccaaccatataaatgccccttcctccgccacccccttccaatgtctctcaataatatcagataacatctcgctagcattctacttcacatttaccgaattcctcaatgtgtccaagcggacacccgagaatgggccccacattccatctcctccatcattgggagcattcatggttcatcgccgacttcgagatcttgtacgatggccccgcacgcaagatctcctcgtcgagcgaatcagacgccgaaggatttctcaaccaagccaaggggcatgtttgagacctggaagctccctgattccattccctagatctaagcgctatgcttggctatccttgtgtttacaatctctaccaattgagtccacgtaggtcgatctgtgctccagcccgccagcatggttataatggatcggatcggcaacatatgtgtgggtttccagaaggttgcaaagttactcatgttatagacgtcgactaagttcagctaacttcactcgagtgtgttgagatcagtctcccccgggagaacctggctgcaaaatgaagcgccttactcagtcacttgttggcctgctacttgcctgtggtgtttgcgccgaagctgggggtaagaacgatattatccatgcttgtaaaggattttgctgatagcgatagccgacaaacaaccccgtgcaaatctcgctcaaccagcctataccaaagaggtagtcgtctgggtcaatgagaagggagaaaccatcagcacggaaacacactacgtccaggccttgacctctgcgctccaagagaatgttagtagatagaactgttcccgaagaagagaagagatgttggttcctcatcaaaagccagccctaactctctcatcaaagcaaccctcaatatcaaccccggatacaaatggtgcaccaccacacgccctatctaagaacagcaacgaccaccccgtcccagccaagggcaaacccaagaatctaccacaccacccacacaagcaccccaaaccagccgtctcccattcccaccaaaaccaacacccaaacgccaacttcggcatatcctactccccctacaaagcagaccgcacctgcaagaaccaagaagaagtaaaccaagacttagaccgaatctcctcatactccttcatccgcatctacggaacagactgcgaccaaaccaaaaccgtaacgaccgccgcccgccgccacaacatgcaagtcttcgccggcatctacgacctaaccaacttcccctccagtctagacgccttcagcgaagcaataacagatccaaacggcaaaaaagactggtcaatcttccacacaatcgccgtaggcaacgagctcgtaaacggcggcaccaactccgccaccgacgtcgcagccgccgtacaaaccgcccgctccatcctccgcgcacaggggtacaccgggcccgtcgtcacagtcgacactttctccgtgcacctcgaccacccggaactctgccacgtgtccgactactgcgcggcgaactgccatgctttcttcgacgccacgcagcagcctgctggcgcgggtgcttatgcgctcgagcaggcgcgcagtatctcggctggggctggggggaagcgtactatgattacggagtctgggtggccgcatgctggggatgcgaatgggggcgcggttccatcgaaagagaatcagttggcggcggttgagagtttgaggaggagttttgagaagaggaggggggatttggtgctctttacggcttttgatgatttgtggaaggatgataatatgtatacttttaatgcggagaagttttggggcattcatggagggttgtagagctggtggaggttttcttttctgttgctcagttaagttggcttttgctctttctttggctggatgcatgcaattgttcgtgtacatagatcactctggaattatcggatagtcgaatgaagaacgaggtattaacaaagtttgatatggttcgctgatgatactacttgtacatgatattgcagactatacattagaagcaatccgttcaggaacaaacagagcttagctgcggaacgtcagagcagcctcgcgttgcttcgcctcttcctccgaacgcgcctcgatctgatccatccagccatccttacgggtaagctcatcgaaagcctccttgttcgacggaatatcccagaagaaatctttctcgctcggggatgtccgatgagcctccacgtcccgggcatggcgaataataagtgcagtcagcatgccgcgggacttgctactcgggttgatgcccagctggttcatctcccgcaggatcgatgttacagcgggaagatccttgcatacgcgccagtggtagtggatcaactcatcgtacaatccagaggaagcaccgaggaaagtagacacacggccgtactctttgatcgtcgagcggaattgagggatgagtggggattcgcggaagtgcgtgttcagcacgcggaaggcgatcaggagggtcttcgggtatagagctactacgacgggggcgactgggacaacggctgggacgcggaggggtcctgatggccgggtgggtggttcgggctggtctgctgtgctcacactctccgggtctgaagcctccacgagagatttctcgtccaggtggcgcagcatggagaagatgcgctctttgcagacctcccacacgcccagatcgcccttgccttcctcgatagcttggaaaagtgcgaattcgatatgctcggattctgcttgcacgacgatctctatcgcccgccgcaggctgacggttacttcggcggcggtggctgtggcgggctcggtatagcccagatcgcggagcttgattcgctttggaccttggttctctgctgggacttgttcttccgtttctgacttctctggtcgtcggtaagaggagtagtcgtccttcgcctgctgcttggctttcgtatctgccctctttcgtcttgggtcttttagcagattgtcaaacaccgacatgagctctgccatttcggctttcttctcctcgctcattggtgtcgatgagctcgcctcggtagtttccccatcgtgtttgaatccaagctgctctaagagtcctccgaatatcaatttctcctggctggtgatcttcggtgctatcttcgttgtcttcttcacgacagacggtctgaggctaggcctttcagatacagatgctgcgcgtttctgcagatagcttcgtcgcggtttcggagctgcctcggtctttgagctgttggtaattggttgttcagaagcattctgacttgtgttatcctccgctaatgatttgttttctgttgcatcattggcctcggcattgttctgggtagaaaaagagcgcggaaaacgacgattgaattggttccgagccgcggatgagagtggtgtaagtgtgcgtgtttgatataggaaaggtgccgtggaattgcttcttgagagaaggcatagccggttgatatttgtcgccatagctgcgtccttaattgcgcagccttgttcttgcacttcttagagtaaatccaacctggagtaactcttacttcttctctttcacctttcaactttgcaacttcactctaaaaaaagaaaaacaaaagatcactttttctttaaagagcacggactccggtgatcaacttccctcaaagtcacgtgatgtcgtgtaactggcccacgcgtttccaagacgtgcctcgcaccccagaggcgcaaaccgcacgcgaacccggtacgcctgagattcccgaaacgaacatgtcggggaaaactgagttgtcagacttcgaacagcagcgcttagcaaatattgccgagcgcgacgcgctgttgaagaaactcactctcgaatcgcaatcctcgggactcttcgcaagccctaagaatccccgcagcaatggcgtgaaaccgaaaaagcgcgcagctcctaaagtgaagactgaggaagttatcacaccgcggcgtacgtcctcacgccttaagggcattgcggccgaaagtgaagtagcaaagcgcaaggccgacgacgaatatgaggcgatgcgcgaagcagatagactcaagaggatgcgccggacagactcattcagtcaggcagatatgtttatttctgggcagaagcttagtcctgatagcctgatcggcgtggatgttatcaccaagggtgttgcgaagccctatgagaggaccttcgggaaagatgaaattgagaagacgacggacaaagacctgaaggctcttcggaaggagatgaatgggttgaaattgtgggagtcttgggatcctcaacgtaatcactatactctccacccacaagctaccattctgacacattttcgatcattacagggatcaagatcaccccggagcgtgtgtatagcatggtctttcacccatccgaatccaaacctcttatattcgcgggtgacaaactgggtcatctgggcatgttggatgcttcgcaggaaaagcctaccccgggtgaagacgacgacgaggatgactttgatccagatccagtcctaaccacattgaagccacatactcggaccattagcgcaatgatggtcaacccctcaaagccgacacatctgtatacggcaagttacgacagctcgattcgatcactggacttggagaaaatggtctcttcagagacctatgctcccgaatctactactattgacgaggcactctccggagtagacatggcccccaatgaccctaacacattgtactggactacactccagggtggattcgggcgatacgatacgcgaacgccgcggaaagataccaatgtgtcaaactgggaactctctgagaagaagatcgggggcttcacactgtgtcccacccagcccaactacttcgccacggccagtctagatcgattcctgagactgtgggatctgcgcaagctgtcgccggaggatcccactcctgttgccgaggatgaaagccggctgtctgtttcccacgcagccttcaattctgctgggcagattgccacctcgtcctacgacgacacattgaagatatacgatgtgggcgcgaagggtctcttttcgtggaagcagggccacacactttcagcaaaggagtttaagccagacacagttgtccgccacaactgccagactggccgctgggttactatgtatgcttatccctctctttcctttttcgcatcccttttcgttctgccaagtatcattacctaactttgttcttctagtctccgccctcaatggcaactgaacccgcaatcttccatccagcgcttctgtatcggcaacatgaaccgttttgtcgatgtgtacagcagcaatggggatcagcttgcacagcttggtggagatgggatcacggctgttcctgccgtggctgtattccaccgtagcaagaactgggttgctggtggcaccgctagtggcaagctctgcttgtggaagtgatatgaatcttcgctcatcttctttatgcagtgtgaggctgtataggttatttgctaattattttactgtgttttgagcttcctttgaagattcggtgttgtaggaggcgtgttgcctaggattttgtttatcccctgctgtgttgttatgacgacagacttgctattgttttccaatgtacagagaccttgatctgttatttctatctaataacagtcacaagcttacaaaaatgagaacaccaagccattccatctattggaaaaacataaaaatagtaataggtatttacacgatggccaccatctccagaggaatccgaacacacaagaaaaagacccagatgattcctcagaacgaccaaaaagagaaaaacacaagagcctcagccgagttcaaaatcagatcgtgttctttttagctctctttgtttttatcttagagctagactggaggagacgtgtataagggagggcgggaccatgaaacacacaatcaaaagaaggaatgggtatcaacaccatgacacatgctttaggggagaacatagacatatagatgatcaggcagaacggaactcgaggcaaaagatggggataaaagaggaacgttggaatcatgagcaatcataagcacatgggaaagagataggcgagaaagaacaaagtcaaaaacacgtaagaatgaaaggagattgcatgggcaggcattggtgcattaagattcattgcgtagatcctcgtgcgagtggttgttttgattctggtcacgttccttagccttgcgtcgggagggagcaggaacaaagtcgaagaagcggtacttgctcgaggaggaggactctttcgtgacgctggccctgcgtgccttggcagtatcagagtactcgagagagtaggtcgaggagttcttcgagcttccggtactgtcacgtgggtcagaccagcgtgggatggcaaatggaatgcggctttgatcccaggtcgccgatgacgagcttggaggagtgtcatcctcgggatcgggaacctggtcagtggagtggcgagctggaggacgcgtagggaagtagccagtcgaattgcgatggctgcttggggcggtaccaactgccgtttctggcgctggagtgccgggtttgcttaagctctcgtcgtagaaggtaacaggtcgctccatcgaatcgaccagtgcttcccatttgatctcaaggtttccactcggccgttctgcttgctcggctcgtttgagacattcctcggtgcgtgcccgcaggcgaagggcttctttttggaacttggcaaggctgacgtccagctcggtcaattcgttgagtcgttccggggagacatcaagccagactcgtatcaagttcgcaaaggagcgggcatggtcaatgagaaatggaaggctagggaatccctcacgcgatgtggggggcaaccgcccaaggatttggataggggtggtgtaggagggtgtgacgatggggactggtcgatcggcgggaatcgcacaaaccgaatcaataaagtctttgaattccgtgcgatgaccaacgaggaatttgttcatcggttccatccaaggttctttattgccgaatgttgtcatattggccagaccttgcaaagctttggcaatgagggtcaaagtgcgctgtgcacgaggacgagggtgatctggagatgattagcaaaaggacaagtcaaggtacgagcgtagttccatacctttcaaaagcccgaacaatttcgggttcagaatagccgggcagaagaagcgtaggaagaggaaaccagaaacactactgtacgtcacggaccggaggaagtcaccataacgatcgtctgcacacgccctgacatgccggaagatgcgtcgcagttctgggggacacctcgacgcagatcccgcaatggatttccacacgcttgtggtgagagctgtaaggtttcgccagttgcgttcaagatcctcctggcgtggaattcgagacggatcaacttcgcattccggatcgctctcatcaatatcgcgtagtcgttccgcgacagtctcctccaagtactgtttgcccaaacgacgcatgtgaagatcgagggccttagttagaagcgagtttccacggaacaagaggttagcctccacagtggccgtccttcccatgtctctgacaaggacctcgcgctcttgactagtctcctgtgggttggtcgaatgaatcctcgttgtatacctcagccggttggtggtggattctttgtgaaccccatcgatttcatcttcaaccaaggctgagatccattccaccgttgaccctgagacctgataaatgttcagaagcatctcggccaggtgatttagctccgatgacatcagttgtgccatgttgattgtcaggccattagtgaaggagtggagaagttccgacattgccgagtactcatcggacatcaagacgacagtttcctccatccgtgctctcatgaacatctcgccaattgcctgatcttgattatccaggataggccaccacttttctatatccacgccggcatccaattcttcgagtcgcaggtctacccgtccgaagacaatatcatttgcggaaatttcaatttcatccagcatgttcaccgcattcacgtcttggttgggtgcgtatgttccatgcgcgataagtgtccagtccctctgtgtcgggttgagggttttaacgaggatagaggcttgggatagtactggcggtagatcagtgaagataaaatcttctcgccagaaaggattcatggtgcgatacttgacagcagtcttgccacgaatttccccatcgaggagcacctccgtgtaatagtcgctgaccttcgagcttggaacaggctgaccatgtgatcttgatgcctttcggcttcggggagtgtcctcctctatggggcgaaacagcttcgcctccacaattttcaagctcaagaatctttcaatccggaacatgtcttttgtcactgctacttcgtttgcctcgctttctggttttcgatcccctcccttagacaccggaccatagagctctgggattgtaaatgcacggagaagtacaaaccaaacctcaaagagaacacggttttcgagagcgaggtatataggccgcacgttggaatcggataccgggtgtgctgtatattgaggatagatggcaatgcaaaactcatcatccaacaccgatgagttcagctgctgaatagcacagcgtgataactgggacaactgcacatatgctaagagagcgacgtcggactctgtgtagagcttgaaaaagccgttttcttgtagtgtgcagctcaccttctgccacgaggaagaaagagcccttgattgtcggtacgtagatacgcgacgtccggacgacggcattgcaccggcagcagacggtttgtcccatagaagcatcttaccaactttgatgatagttgcatccttttgtgatgcggtttccgagttgcgtcgacgttcggggatccgtcggtctccaatcacaacctcttgaggctttgtcatcttgttctgaacgcccttgggccgaattggttgccaacaaagtagagctgcaagccaagaatcgaaggtttcgttcacgtgcggtcgtagttgtatcccaagccccgaggtaaatgtgtgaacgctcagataggtgcactggagctcagggtcccacaatgtccgaactcgacaaccacgtagatcaggaattaatgttttggccaatgccggctctcccttggcttggtaaatgagacttccagtcgcgacgttgatagcgcagtatccggatgtccaggcagtggtcgaggctgttcgaaaagatagaatgccatgcattctaccgcaggtggtcttcatcagctgcaggatcttggtgccttccgcactcgagaggggcgcgccaaatgaatcttgattttgtgctccaccggcgaccagacctgcaactttgctcagtcgatggcgagggacggtctggctgttgtattttggggactcaattgacggaaaaccgatggaagaagatggatcgtcgggcactttcgattgagagggactggccgtgttaattgacccaacgcgagttcgagttttgttggggttgacgtcgctgtgctcgtcagccgctgttgtccttgatcgcgcccgttgactccttgcttccagcggagaatcttcttcgcctgctgcagatgaatgtttgttgaaatcccgacgacgttctggttcgacgggccgtgatcgcacggtgtttcgagctgaagacaaagcgccgcccgtgaggtgctccggttcggatgagggggaattgttgacagagggttgtgactctggcgtcacagttcgaatggtagtttctcggaaactgtcgggatagaccataccatgccggtccctagatgaagacttcttgctagcacgccgttccactggacgactgtataacgcttggtgcatcgagcttcgcttgtacgcgttcggattctcgggctccatctcgttctgttataggacagccccttcgacaggcgatagagacaaaccgaaaatgaaacccgtcaatatgttaaaagaggagagacggacaggttcactcccttgtcgcacccaacacaacctccctcaaaacaatcggtgaaagaagagcttgttggcaactgacgtatgcggcacggctgcgcttgtataattgaggatcgcttttgcccaggagattgttatgagacaacatggagtccggtgagaggttgggtattggggtcgcacattcggtcgaggcgccgggagaggggaagtagtaatgggaggctaggacaaaggaggcgcgggtcaccgtcgtttgtctgagagatgcaggagaatctaacgaatgcgctaagcgtccaatggtccggccagtcgatagcgagggtgtcgctgtcagtgttagtggtctgaagaagcggcccgatagaaattggtagttgagaagggcgtgaagtgatatcattattagagggaggggagggggtatggggtagggtatatgggagtaaagacatgcgcacataccttcatcagtcccttttgaaattgggaaggttttgcttatgctctttaggagaggtgtgcgtgtgtgcgcatagaggtgtttttgcggattccagcagatgtaggccgctttgggacgggggcagaatgagggggaaggtcttcaaaggaaaatatttcccattaatgaagaatcaagttgaaattgcaatgggaagatccggtaaagatcgccaaaagccagagagagagaaagagagggagagggagaggggaggggggaggggaggagagaaagaagtggatagcggagctgaatctgtatatgggaaaaataacgaaataatgaggaatggcaacgctttctgacccttttgcctctatcttagtctctagagcttgctgcaagtctattattggctatatccgtcaatttatacttccccccatgttttaggctacctggatgacagcgcaacgtggatgggcacgttctatatacatcctaatcatccccagagcaagtgagcttggactatttacctcgatactccgtagatgtagatccaacccccagcctttcagcttcagtttaagcctttaaccgaagataccgagtctatattgtaatatcaccggagcaagggaagaagtaaatagcgggttgaggtgaagatcaatagctttcggatttttcgaaaatggtcctaaactgccgagagattttctagaagtcgggataactgcatggcgtctttctgctgactcgcactggctgcggatcaccgggctagtggaaatgggccctgaagtcttgagtcatgacggtcatgcttgagatattgatccctttgtggccgtgcatcgtactagtatattatattataaatgcatggattcatatgctcctgacgatggcaaccttctccttgtatttggattaactctatatgattctaaatgaatgtttctatacggtctgctctgcaatatgcaaattcaaacgtggtgtccggggcgcagatcctggccccaactatggtacatatgcacctaggctaacaccttgacgcagtaggtacttttgattcgctctagttacttatacactaatagagacattaataatgtcgtagccggggaggggagtctctactaaaacaggttgagggaaatctccgaaagtggagtcaattgttagtctgtagcggttaggaaatgagatcttcagccaggattatatactggagtcacacagaactaagttcagattgagccgtagagagatgataaatatgagcatgtaagcatataagcatatctgattttgaagtattcaacacaaaaaatagcaagtcgcaatttcaaagtgcttcttactcagtacggtacggtacccgctcataaccatcgtagatgagtgtattgtggaactgtggatcaatcctaaattgttgtactttaccagtgggttctggaagtcttccatgcacgcatttaataacgtcggccagggaagcgattggacgacggggcactgcggattcgagacgactcaagaatgccggagacaagcgtaggcagtaagatggacttttaccgacggtactcatagcttggcatgccgcagctagtgagtactagtactagtactatatggtggacggaaacaggccgcatagcgtcctgttctagcagagctgtggggtgaatgtcgtaggaccgatagaggttcggagcgtgaattcattgtggagtccctccgatgttcgggaagatttattcaggtatgctccgggacaatcttgtacgaggcttgaatatctgctccgctcgagatagttgtagaccctctaagctagtgaggttgcagcaggattcgaaatcaataagataattttccgtcaggagttatgcaaagaaatccattctagcccaaatctatggagctggcgattgaataattatagagtcaatgagtgagaagaatatggaggtagaatatggataggttagtactgatggaggcaaagtaaattccggtatccatatcacctgtggagataagataaggtccacaagggcccaatcacgtgatacacacacatgactttagattgctgcctgaggccatataccccttctttatgtcatcatagctatcgggaggtctggggaatgatcatggctcctggtgactgttatcacgaggactaaatcaaaggctactattttataagctggtacagtcaccttaattagggtgcatgctcatttgaaacacgattacgttcagtctgttgtattgatagtgatccccatttatccgcatttcaagcgccgctggatggcatttcattaccacgatcactggcttctgaagctgttgccatgaatggtctgactatagccttagtctgattcaaaatgatgtcctctaacatattatcacggttcctacctccaacgggctcacgatcggtctatgagaccattcgccaacatgacgtcgggtccgaatactctgatctcgaagaacgtgcgggcttggtcatagaagaccaacaggaacaatttagtgaccgggaactggaggatgcactagcggatgcacaggatagtgaaataatcagccccagcactgcattgcttgggcaggcacggtcgggcaaagcacctgaagagcgagcttctccatctggcacccgccgtcgcaagtcgtcccggcctcggtggatgccacaagaatcaccactcggatatgagctcgatgatcatgatgaggacgtccctcagtctctgctggtggaaggtcatcacgaagatctgaaatcacagttacctcctcctccccgacttcatggtcgtccggaccgacgaagaacccctagccctggtccatcctcacaacacaccggaacacgttggaatgaacaagcagcccatcaaacactgcccagtgaaagcggtcatccaatagggagatggttcaccggccaacaccctggtcttgccaatgttgaccccaagaagaaggcaatgtggcggtgggcgaacgtcgaggatctggataacttcttaaaggacgtctacatatacttcttagggaacggaatttggtctattctgctgactcgggtgctgaacctcttgtaagttcacgatgaaaccctttccaaagcatcctaggagaagctgacagtacacacaggacatttgcattcgttgttggtttctctacattcttaaccaactgcattgattattctaaggttcggcgaagtaaaactctggatgacatcctcgtgcctcaatgtacagcaaatatgtccgggtcgtccacatttttgctgtggctttttagcttcttctggattgggaagcttttccagtacctactagacattcgcaggctcaaacacctgcatgacttctatttctaccttctcggcgtctcggatgccgaggtgcagacgatttcatggcaagaagtggtcagtcgactgatggcgttgagagattcgaatccatctactgcggctgcggtttctgccaaacatcgaagattcctgggcagccagtcaaagcagagaatggacgctcacgacattgccaaccgcctaatgcgcaaggagaactacatgatcgcattagtgaacaaggatattctggaccttactctccctatcccgttcctcaaaaatcgacaactcttctcccgaaccatggaatggaatctcaatctttgtgtcatggactatgtctttaatgagcaaggccaactgcgaaccctgttcctcaaggacacgcatcggagagccctgagtgatggcttacgtcggcgctttattttcgctggcgtcatgaatattttcgtagcgccctttattgtggtctattttatgatgcactacttcttccggtacttcaatgagttcaagaagaatccgggccaaatcggttcccgtcaatatacacctatggcggagtggaaattccgcgagttcaatgagctttggcatctctttgagcgtcgaatcaatatgtcttatccattcgctagtcgctatgtggaccaatttcccaaggataagactattcaagtggcacggttcgttgctttcatctctggcgctcttgcctcggtgttggcccttgcctcggtgatagacccggagctcttccttggatttgaaattactcctgaccggactgtgctattctatcttggtattttcggtacagtctgggcctttgcgcgagggctggcacccgaagagaccgatgtcttcgaccccgagtatgcacttctcgagctgatcgattttactcattacttcccgtccggatggaaggggcgtttgcatagcgacgacgtgcggaaagaatttgcaatcctctatcaaatgaaagttgtgatattcttagaggagatcttgagcatgattttcactcctttcgtcctatggttcagcttgcccaagtgcagtgaccgcctcattgacttcttccgggagttcaccgtgcacgtcgacggggtaggctatctctgctcttttgccgtattcgacttcaagaagggcacaaatgtgctttcccaagccgggcccgggcgtcgagaccctggcaaacaggacctgcgcactgattacttctcaactaaagatggcaagatgctagcttcctactatggcttcttggacaactacggtaccactcatcaacctaacagccgacgacaattccacccaccgccaaccttgccaaccctcaactcacccactgcagccgagttcggtgctcttcctgatcgccctgaccatctccatgcacgcactgggccgaccgccggtgtgccatttggcgctcaatcaatgatgggagactctaaactaaggcaaatgggaggattcgatcaccgatctcctgctccatccatcctgcttgacccgcaccaccaaccctcaaccactgggttccgcgccgcccgaaccagcccccagcagcaccatcgctcccggctcggacacccgtctacggatactatcgacgacgaagaagaaccattatcccaagacggtcgtgaatcaacaatacggcagtcgggtgctcgtaccggtaattccagtgcaggtgcaggcactagtgacggtaacctcggcggttcttggcgcatgaacccactcagcaaggacgaggatgatcctgatgagggcgatgaaggtgaaaatatcgacgccattgctggtgggggcggtgttttggggttgattcagcagttccagaaagttaataccgaaggcagacggacggggatttagatattcatctcctgtgccacttcttggtggtaggcttacttagaaagctcgttgcttatatgcttcagacacgatatatgaccatttcatgcagcgtttagtctttcattgctctatcatccatttgcctgtcatgatgtcagcagtatgtttgtctactaactagtcctaagtcacatgcacccatgaacatcaggcaccttaggaatctgtgtaagcgcccaaataccgatacacctctgtgcccctcctttccctccgccatccctccatccctccatcgctcttgatgtgccttcctctttgaccttgcccaccgacaaaccacattcatatccacagaaacaacctagcatcaacaagatgctcgactgtatcggaggctgtatctttgggagactggcgaacgagccacgtcctcccaccgacccccgatcccctgagcccattgcctctgccattgtcaccacaatactcaatgccgacgaaccatactcgctcgacaaacaactgaacgaggaactttccaccgaaagttggaccgacgtcatagcacaagctatcctccacggtctagagaatgcaatcaattccggcgcagacatggcgaaagccgcctctgatgctgcggcccagagcagaaacgctgctgtcggctttgcgacagaccatcctatgtacactacgctgattgcattgggcattctggccttgttgacaccttgggctcttgaaatccttgggtttggggagttgggtccaattgagggctcgtttgcagctgggtggcagagatcatttgctggatatgtgcctaagaatgctttgtttggctatttccagaagctgggtatgaaatggcgttggatttagatctgtctgagtatggtcctcctgatggaagttgagttcacttcgtattggcggctggaagttcgaggtttaccgtgcccaatattttactctctgtcaatttcaatcggttcctgaagaaacaaggtcgagcaatgccaatgaaccctactcctactcgctagacaaacaactgaacgagaaactttccactgatatcctccatggcttagagaatgcgaccaaatccggtgtagacatggagagagctgcgtctgatgctgcagctcaaagtagaaacaccgcatcggctttgcaaaataccatcctctcgaggatatacatcaccgataataagaggggtatccactgacgatgattatacctaattgggatatggttagcaacaatatactgtaattgactcaacttcacgtgttggagcttttggtgttaaaaattgagtaagtagtacttatttgtcttttcttttcattttatttacaaattttccatatgtatgtgctgtatatagtatgtgccatgcgaatttcccgatcggggtgacgctcagtaagcaagcttaatgattacgtaatactcagggggtgcccagtactaaagcggaaagggaaatccaacttgcttgaccaaagatccggtgtattgtatgactatgtatgtgactacggagtaccggagtacggagtacatcgttaactatagaataagacatgacaggagtgacttatttgccacgtgccatcctttagggtctagaaccgcactcgctatacaggataggctcctcgctcaacttaggttttagggacaaaacctagcttagggaagcattcagctagacctactactgacttcatgtacctcactagttcactaggtcaatgtaacataacctactagtcgttaccccgacctagtgacctgatgacccggcgaaccccctatttatacttgagtactccgtattgtgtaggatatatcttccggtccagattgctgtcgatgctcccatgcaatcataatcgcgcggattattatgtgtctttcggctgcaggggttattagcacaccaatgggagatcagccatgtggaccacctttgtgatggaggccgcgctgagacaagctagcggaagagtcgattgatgataggccaacatgagaaacccttacgggttgcatgcatttaatccagtgacggtccggaatctggggccaatggtcaacgttgaacagcctcgttattttattcgccctaaaagatgccgtctgggctgcaatctccactatgtcttgaggcccaaaaaccgcagttctccggggcattgaggaattgagagcatttcatcgggaaagatctctttgtacaagagaaattgaagttggaaaaaacataaaggaaagatataacatggaaataagagttgaagaaaagttgaagatgtcaaagaacagaaagaaccaaaatagaacggggaggctctcgtgtggatctttttgtttacttgtggagtctcgtgatttcatctggacttggctaatttccttggtgtcttcctttctccttcctttttttttttagtatttttttctcgaaacgaatatacctagaaggtgacagctcgcgatgtttcgagctcgccgataccgagttctggtcatattcgcggcggctgtcgtcttcacattcttccactttgcgcggtcacgcgattggagctatacagtgattgaagagtctagcgttcactcacccgatgctgcccatccgcaaaacccggccgttgctgctgccattgaggagagtcgaaaccgcgtgcttcccgaccccaatcgcggctccacctcctccccaccacagacagagaagatcatctcgcccgtgggccccaatagcggctcaaaggacaacaaccggtttaaagatccctccgacactccaccagtgaagactcccatcaagagtgatccgaaggactctgcgaaggactctgcgaaggactctgcgaaggactccacgaaggaacccgcgaaggaaccagcgaaggtgggaggcaccgacagcttgccaccaccggcaacggagaataccaatagcgtaaatgatgaggaaattgataatggagggacaggcagaatggcagcggagcgccctgaacctggcattccaacggccaagtggaagaagttccccgaacggttccccgtccctgcagaggaggtgatcaagctgccaaagggagagacgaagaaaattcccaagctgcaagcgaagttcaaggatgagtcgagctccggcaagcaagagcgcctacaacgccttagcactatcaaggccgagttcacgcatgcctggcgaggctataagaagattgcgatgggacatgacgaagtcaagcctctgtcgaaggagtttgaagacccattcaacggctggggagcgacattggtcgattccctcgattctctctggattatgcagttgaaagatgaattctccgaggctttggatctgatcaaaaacattgatttcaaaacgtcactgagagcagatattccgatgtttgagacaaccatccgctaccttggaggtcttttgggtgcctatgacatttctggtcatcgatacccagtgcttttggagaaagcagaggagcttgctgaggttctcattggtgcctttgacacacccaaccgcatgccgcacctttactatcgctgggccccgtaagtcttgtcacaaattcttcctgatcatctagatgacgactaaccaacctttctcagcgagtatgcttcgaagccgcatcgggcgtcttcccgagccggcctagctgaaattgggtcgctttccttggagtttacccgtttggctcaactgaccaagcgggacaaatactatgatgcgatagcccggatcaccaacgaattggagaaaatccaagatttaactagcatcccgggactgtggcctctacgggtcaatgcacagggatgttccaagtactccaagaacacacctccgcgtgatagtagccctacacccgagcaaaaccttgctagtgcaaccgagactaccactacggtgacccacaagacttacgctgcaccaacagaccttgagagctatttgaagctcatcccacgagacacaagccctgacatcgaaagatatgcccagcctgccaatgatacgcaagctgccagtgagcctcgcattcagtcacgcgagcaaaatacaccagcagataaatgcaatggcggcttgatacttccccattcaccccgcgataacgggtacgccatgggaggaatggctgactcgacctacgaatacctgcccaaggaatatctgctactgggtggcatgaacgagcaatacatgaatatgtataaaaaggcagccgctgcggcccgcaagaatcttctcttccaacccatggtgaaaggtggacgtgatattcggttcatggcctccactagtccaatgacacctggaaagattgcagagctcactccatccgatcttgaatacgaaggcgctcacttgacgtgtttcgtcggcggcatgttcgccataggagccaaggccttcggcatcgatgctgatctggaacttgcagccaaactgacggacggctgtgtttgggcttacgagtcgacacaaaccggagtgatgcctgagcgcttccgccttttgccctgtgagaaaggctcggcatgtgagtgggatcaagcccgctttgacattggtgtggcacgctactctcgcatagaccccggggcaggacattcgttccgcgacggtgagagcagctacgaacagcgcgtgaatttgatctcgcacgatccaccccaaggatcttcgagcgggtcggttcccatccccatgccgggctcattaaacccccacgatagcgatgtgttgtccaagcgagatggactcgcattaggaaaacgtgcggaagcaattgctcctgcttcaagcccgagccctacttccagtggaaccgaactggaggaccgggatgcacctcgttcgtcttcgtcgcccgcttcgcctcacatcgccgaagtcggcaaagaccacctccccgcaggcatgatcagtatcccgtcaccgaaatactaccttcggcccgaggcgatcgagtcagtatttatcatgtaccgtctgactggcgacgaatcctggcgtcacaaagggtggaagatgttcgaggctatttcgaagtatacccgaacggagctagccaacgcggccatccacgatgtcacagcccagaaaccgatccacaaggatacgatggagtctttctggctatctgagacattgaagtatttctatcttttgttcagcgaccctactgtcgtggacttggataaatatgttctgtaagtgactgacgtagcctgtaaacaaactctgaccaagaactgactttttacaggaataccgaagcgcatccattcctgcgcccacttgcataattatgttttacattttgataccaatgaaagttctttgttctataacacataatctcccatagacctcgtaataacgtacaagataatgtgtcccttagggttggcccgtagtgggactcttgaattccccccaatcccccgcccttcaactctctccaactcttcaagccggcacataaaccggcatgagctgtctggtgggaaatggagcctgaggtctcggagactgagttctggactggtacgttgttctcagcccactattttctcctttcaagataatgcgacatgacaattgaccggttctcgcagaacttcaagcgatcgtctccaagccctgtgactccgaagaccagatcgacgacgctctcagagcctatctcgatctagcaacccaacacaaaggtgaatggcacttcgacctccgagaagcgatgttaaacccaacgacactccgaaaccacgtccgctcccaactttccttccactacgactaacacacgtgcccttccctagatgaatacctccggtcggaaacagatttctcacgctgttcctacaagctattcacgtcgagtatattcgccacacatgcggactacgtgcgacgacagattctctacggtctgctgcaggacgacgacccggataccctccacttcattgcgtcattcatcctctttgacggacgacagaatgaagttgtgcttcagatgctaaatgaggagggcgcgtttgcgcgtctcctcgagctcatacaggcgatgcggagggcggatctggacggcgacgcgggtcttcatcgtttgttgatggaccttgtgtatgagatgtcgaggatacaaagggtcaaaattgaagacttgggtgcgttttggatacacgtgtgcctgctgctggtagctgattatggggcttgtgtgcagttctcgtggatgacgatttcatccgctgtctctttgatatcatcgaagatctctcttacgatgttaccgatccgtatcattaccccgtgatccgggtgctggtgagtactttcttcaggatcattttggttagaacgggattgacaaattgaccagctggttctgaatgagcaattcatgatctcggctcacaacccggtggacggccggccctctggtcatttgaccaacaaggtcatcaagatcctatcagtatatggtgggatgtataagacattcggggagaacatcattcttcttatcaaccgtgaaggtaacggatcctcctattcaataaaggcaatgactgacaatatgcagccgagacgtcccttcaattgcttacattgaagcttctctatctcatatttaccacccctagcacatatgaatacttcttcacgaacgatctacacgttctggtggatatattgatccggaacttgctcgatctacccgaggaggccgctgctctgaggcatacttacctgcgtgttctttacccgcttctagctcatacacaactacgatacccgccgcactacaagcgtgatggacttcgagggctactcagcgtccttgtccggggacaagtctcatatgggaacgacgcagaacacgagaaaatactgcattttgaagaggtcgatgaaacaacccgtcgacttgtcgcccggtgtgcgacagtggattggctacgtaatgttgaacagcccgacgccgcagaaacgcaagatacccccactcaagagacaacaactacaattgagactgtcctagaagaaggcgagcggcatgcgtcacctgtagatatgggcgaaccactcgatatttctcacacactctcacggtcaagcacagtcgctagctcacctggtaccgcatcaccaacgcgaacggactcgtatagttcgtataatacacctgggagtcggaaacacagcttaatcaaccggctcggcatgaacctagagcccgcatctgcatcttcactgagcgttcaggccgttgcagcacaccacgaaaaaccaggcataatcacccccagccgcaaagacggagtccctgtcgccgctctcagtgacgagacgccaataatccgaccaccaaaggtcaagccagaaccaccgaaatctcgacgctggcgcgggcgccgtatggccgtggatgaagacgagcaccactctgccggcacaagcagtgacaggaacaccatccccgaaggcatcgaagtcagtcccaccactgttatcactcccagcacaccaccaccaccacagacacatagcagtgatcgcgactcgggctcaggttccactctcacaacttcaggtccaccgcgacgatctgtatcaaaccctcccccggccctcccgccaccacgccgttccagccataacacaccatcctcaagtcaccaccggcccgtcccagcagcgggaacaagccgacatggtcaggctccacttccgccaaaagcgcgccgttggggacgtggcaaaccccagcatggacagagtgactcggtcgagagcggggccagcagtgttagtccatcgaaggagcgtgaaactgctgaaaataccaccgtgcttgctcagcaagagctgtcacagtcaccagagcgcagcgttctttcggatccgttctcgccaaagtctcccacactggtgatttcgccgatcgaggttactgcggacaagacagatatcccagccgacggtgctggcgacgaccatgtgcatctcagtgtagaggaggcggtgcagaatgtttccctgcagtgagcgttacttctcgatctgtttaattcctttctttttcattattagatatactttttggctcccttcaggttgttttttttggcatcaagcgcggctgttcgggtgaacagattgggacatggtaggctatgtctctagttattttgcatggcatggatatttgcgaggacgtcagcgaggaccggatcctagaataacacaatagagtctatttgctgacaagaatggagtagtttacaatagtaacatagttggtaaaagtacaatctatctatgtcccaccaagcaaagcttgcctcggtgaatgacttaagtatgggcctagccatatatactaagaatgaagacgcttaaatcttcaacccccagcttcgccccagcccaatagcagtattccacccaaacccagcacactgtccaatgccggtaatcttatcagcaagcgccttccgatcatcaaagcgacgctctacgaacgccgccgtctccacgagatccggcgtcgggtcacgggtcatgacaacctcagcactggcatagatagccgacacggccagacgacgcgtgtaccaagtagcatcaacagtgtcatcaccagaaagagtaaggatatccgaagcaagggcatgcagttccgtaagagagagggggatattagccaagagcgacatttgcgcgagagcctagatatagacatagattagcatcccaatccaattctaaatcatgtccttcttgatatatcccaggaaggaagggataagaaaggaaaaaaactcacatcctgccaaacatctctaacatccgcattcatcctcaacctctccaaaagcagtccccgcacccgctcctcaacagaaagctcatggacatccttccctttctccgccgcaatgcgccggaataacccgccctcctcgaccttcccgcgcagcagaccccgacgactagcaagccagaagaggatgaggtcgaattcgccgcgggggagcagctgcaccgagacgtcgaggaagccggcgtcccgcgcgccgagggttagtgccgtggctgagaagccgtgtgtggggacgtgggcgagcgcggaggttaggattgccgtttgggagtttgtgtatgagtggtctgggagccgggcgtggaggtctgagtggtagcttcggtggcggaattgtcggggttggtttgttcggggtgtgagttgcgtggtgcgggtgcttggtgtggtttggagagttgttgtgcttagtcctcgggtttggcggagggattgggccacggagggggcgaggacccttttggggagagcgcgggcgaggtaggacatggtttgagtgtgcttgggtggtgcaatggggagatacggagtagatgtgattgttggagatggattgggttggtccgtgcgttgtagtataagatcgagatggatctggtgtattgcagaatctacatatgtatagtattatacttgatgtctgtctattttgattgctatatatgtgtgtagactggacggtatacttgatttatatcgagctaatgattgagtctgattctcggcttcagacatatgtacattttgtatgggatatacatacagaagatacaagatgaaacttccgcagaccatctttcaaccataatattattgaacaacatcaaagtgggatcataactatatactaatagtatacctgtgatagcaatgagtccaactgtagcagacattgtacgtagattaagtatttagatctgccgaggacttgaatgcagcaaagcaaaccgaggagatacctcgaaatgaccaccgtacgtgacccagaaatatatatgtaaaccagaaaagatacgatgaaagaaagcgaaggcacataaacgaacggcgacaaggacaagtacgaccacgatggatacgaaagcccgggccgttagaccaactgctaagatacatacgattttcaaaggataaagactagcaaacctacgaaacacaagtggaagaagatgctcattccattttggaaacaattgatcagcccaaataggcactcgaaacccattttgcgaggacgaagccacgaaagaactgaaatgggaataagggaatcatgaacaagacattgcgaaaaaaaagccagacgcccccctgtcaaagaaagtgactaggtaaaacaaggacgaaagtgctttacatgatctggtcctgggtcagaccgacggtcgactcttggccttccatcatctcttcgggacctgggccagcgttcatgtacttcacgaaggtgatgcccaggggacgaccaccgtactggtagccggagaatttagctgtgagggaagaatattagtatatggattggcagtcacgatacaaatgcaacgtaccaattgcagtttcagcagtatcagcggtgtcaaattgaaccacaccagtaccgcgggagcggccgttaggctcgtactggatttcagcgcgctcgactttaccgatggtggagaacagatcaaccaggtcatcattacaagtagaccagggcaactaatcgaagttagcattccatatgttgcccatcgcgcatcccaaaactcacgttgcgaacatagatgacagcgctcttgtcaccgttggaagtggcataatcagtgaaagggttggggggtccggagggaacaggaggagcaccaccgtgctcaaacccaccggcaccggggaaaccaccgtggctaccaggggagccaccgaagccgccgcgtccagcgaagccaccgccaaagcctccgcgaccaccgaagcctccacgacccataggaccgccaaagccgccacgaccgccaaagccaccaccaaagccgccacgaccaccgaagccggggccaccaccagcgaaccggtcttcgcgaacttcaaggggacgaccctgccaatcgtatccgttgaactgcgcaatggcgttgcgcgcatcatcaggagactcaaaagcaacgataccggagcccttggggcgtccggtagggtcggtgtgcacatcggcacggatcacggcaccttgctgggctgtaatacggagtcccggtcaattcaccttacactagaaaaaagtaggaatccaagtccaaaaatccgcacttacctgctgaacggaacagatccttcaagtcttgccagccaacgttgaaaggaagctataccgaacggtcaacaaagcctgcagaacttagcataacgggggtaaaaagaggggacaaacgtttgagacataaatttggcggccaccgccaccagcaccaccctgggggcctccgaagccaccaccaccgaatccacctcgggcaccggggccgaaatcaccgcgtgggggaccaccaacgaaacggggctcggattcacggtcctggggaaaagtcagtactaatcgcaacaccaacaccatggaatctttgaagacatacctcacgaacataaacaaggcgacccatcaggctctggttgctgagcgtattcacggcgttttgtgcttggtccctggttgcatattccacaatcctagtatacatgtcagctagaacgtcaatttgaagaaagacaagaaagtactcacccgcatccctacaaatcaggacagccaaggtccacccgtcaaccctatacaaaccacgagaaagatcggggaaatagaaggaactagcccctctacatataagcgcccaccttcgacattccattaggaagaagcaaaacatctgcaaagagaacttctccagctgtaaaaaacaaggcgcaaccaggattagcttcgatcgttccaaaaaatcaccaaattccaatgcgcaatccctgctcaccctgtctcataaaatccttaagatgatgccacttgacatcatacgaaaggttgccgacatagacccggcggtcttgctgggacgaatcgcgaacggtctgcatcatattctccttggcggcacgatcctcgaatcgagcgggggtatatccactgcgtccaccgaaaggagagcctgatcctgggggtccggttgctgctccggaagcactcaagggagatctggaacggcgttcgggacggcggtattcctcacggtcaccacggctgcgggagcgactccggggggagtacgaacgacgggcgcgtcgggggggactgcgagaagagcggcgacggggtgagcgagacctctcacgctggatctggtcagacatgaacaaaaagtagatagcaacggcggtcgcaaaagcggggcaatattataacgtataaaattgatgaaaaagagatgggacggagcaaaagacgtgttcagacggcagtcgctatgtggaagtcgcaactccgaggggggtcgtctgcggcgtgggtcatgtgaccactagctctgggggagtttgtctcggatacactgaggacctccggagtaggagcttagggccactggcacagggtgtttgtgcacacatcacaattaattttcagaatcacataacgtgatagtaatgtgcttccgccttgtggcccactgatctccagatccggcagatatctgatcaagtagacatggcggttcccacccccgcactgaccacacgccagcgatagcgacctctggtatagagctgcgagccatgcgcacatattggaatgttttgtagagtcgctggggaagaggaagacaaaaaggaacacggggctcgcggcaaacttacttggtatggtcgatagacgtcggctgggcggatgaggctgtcagcggagaatctcaagaaaccaaaggataggaagaaataggaaaaggagaagaagcggggggaaatgaaagtaccaggcgtcaaggttcaacgcttggggggggggagacctgagaaggtgattggatgaagggctgaaattgaccggggacccttcgagtgtaccaggcagatgagagtaacaaacgagtaatacaaagatacgaaaaagcagagtgtaataattcagaggacgcgcgagaacgtacccatgattgcgggctcgatggagcgccgagatacgttgtacaaagacgaacgatgggagacgggggaggtgaaggtagaagggagcggaagaagtgttgttctttggattccggatcctacaaagactcttggggaaatatcatggagagaagaaaatacagaattctgatatgtacttgaacacctcgggcaaaacccgtcaccgccccggcatatagttaggacctggtgtatacagctatggagatatcacgggggaaggaacgaagctgttagggggtaatgtgaatatcaacccgctctttcattcctaaagaaatatcacaaactagactatgacttatgtactgcctagatatgtacatcaatgtagctcctgaccatacagaccagccttatcgttcttatcgctcctctcacctcctgcgcaccaacatacaccattggacatctgcactcatgactggctgcacggcgtatttaagttactaaattgccacggcctgtaacctttcggaagactgtatccattcaactggaccatgctcaaaggttatacatggaaaagttatttgcactatttaagccttctctgccgtttacctatagaactttatcaggactactaagagaactactagaaaagactaccatcaagcaaactgaatcatgggctgcaaacacaaacaactcttcgtatgcatctttaataagaaaaagaccccctcacttcaataaaaaacctcaaacaataagtcctaccgggaaacaaaacgaaagaaatgggtgctgagtacccagccttgggaatcaagaatcaatccgcggaacaataaacaaagacaaaaacatccattgcgccacaccctgtctgtaaaacgaacgccgatgcagcatgacttttatgctgtgcgagagactgatccggtgtggaaacagtcctaacgagaggaccaaaacgccttggaacggacgagttgtgtaaggggcgaggagtgggacatgtacagataaaagagaacatcaaagagaaatagaagaaatggggtaagaaagatggaggaacaaatgtggagatgaagatagaaagggtggggaccctatgctgccacattggtacgaggataacggcctggcatcttcatatccagagcaatggagttgtctgtattggaacgcagcagaattggaaccttggctacgctgtctgattcgagaccttggtggataggaccattcccaagaccaacggtctggatcttaggaaggtcgagttcgtgatcatctaccgaagtaggattggtatggttcgtaaattcagtcgcattggtgttggtgggcaccgtagagacactctcccgacgatcaatctgggcaggagccgactgatcgcgacggttagagataccgacacccgagacggcagcaagggaagcctgatctccatcggaccggatatcgcggtcatcccgattcgggggttccagctgctggctctgcctcttcttagccactgccacggacggtccgatccaatcaccgtagtagctatcgtgctggttactatcagggcgagacctttcatcggtcccgtcgttggatctgtagctttggtaggagttgcgtccgtcgccgctacctactggtcgcaagctgtcattaaaggcactagacccatcggggagggacccagcagcccctaacatatctctgccagcggagctatccccgctggaaggtgacaggggcgcttggaggtttcggtcaagttggacgtcgctggggaacgcgcctccagcctggcgagaggaggtggggcggtcgtgagtcatgaccgcagactccgcggcgtatggagtgcgatcggcttcgtcgtcctccatcacctcattcaccgacctgccactcacgctgcggacatgctgccggacaaaggcgtttcgcgcctctcctgtcatgccaatcaagccttcgatatcttcataccaggacatcatggtctcgtgggattcggcgcggaagacccacgagtggcctcggtgcattgcgccagtctgtcgacccttcagcataaacttatgggagcttgagtcttcctgtgagtgggagccgagtttctgctctggaagatagagagacatgacaggcgtctgccatgctacacgatctgccgacttgaactcgtgaagatgtgttggcgacaacacatacctagagttgattagataatggcttcaaaccgcacggtaaagaagataggtactcaccagccaggagtataactcttgagatacttgctcttacgctccaacataccagctcggacttcagctgctgctggatgatccttgccagggtatgtgatgctttctacatcccggagaggaatccgaggatcgacaagttcttctgtgtcggcaacaaactggttccactcgaaatcttggggcatggagatcggacccgcctggagcttctcaacggtatcaagagcttcattggcttcgcgtcggaggatactagcgtacgcattgtatgccttctggatctcgctcacgacaatcccctctagttcacgaccagagttctctagattcaagaatgcctatagaagcaacattagacaggctactaggatagacaaagttatcacaaacccgatgcaagtagttctcctcctcgatctgtttctcgacctgcttctccacgcccaggcgcaggatgaatggatcacctttgcccgatgtcgcagaggcatcggtatcgacaagcccaagagcctcttgcaagttccgtacggctttgcgtgtgccgtcaacctccttgtcgacggtattcttgaaatcagccgagagactcttgatctccttagtcttcttctgaagatcactgcggagaccagtcaattggctgatcacctcgacctccacctcgacagctttattggcctcggtataaccctggcggtggaaattctggaggatctccgtcgcatcagccagaccacctggctgaagcaggcccggtggaagagtctggttattaacaacgctcgaagcagataggaacagctttgctctagtttcgtaggatttctgcacctccttaaaaaagagaatcaagtccttcagaagcttgcgccaagctacaaatcctagttagcaaagtctccctagcccgcgcattgacaagagtaaaagcccacctccaaaccgattcgccagcacctcggtcgggttcccattagtagggaccggagtcaggaaagcactattgacatcctccgcgccatcggcgtgatacttttcgcgatcgcccaagctcagactcctcacactgccggcgcgcatgctcctccggctcccactgcgccgcaagctccccttcttactcagcgaggccttcttccgcaaggtgctcgaccgggacgggctcgaggattgcacgtgcgacatggtggagacagagcgctgcactccagggcgatcgaacgccgagctgcggtggctgacggtatcaaagtcctccttgaaacgggggttgtggggaacctgcgacgactcgagggcgccggagctgtactggtatgctgacgtgccggcgaatgaattcggtcgcgacagagtcgagcgcgggccgtacccgcgactcaaagccccggggtcaatttgcgggaccatgtatgcatcctgtgagggcgtctgtggccgcgcggccatcgccatatctgcgggaacgtgggatattatggtttatgcaggtgtctcaggatagggagcgaagcagaggatcgaaatttggccgaaagttggaagtaaaaaattaaagaaagggaaaaaatgggataatcaggataatcaggataatagctccaagagtttacaggcctaaagtggcgtcgtttctggttacctggcgaacggagcaattgtatgcgggggaggtactggcagcatgagattcgccccactcggttggaaaaaaaaaggagaagatcaagagattgggctgccgacatagggcagagctggggaattaaagggaaaggaaattctgacgatgacgtctacgagatgcaagatggtgacgaccttggaagaaactaggctttcgggacgaccgggagaaaagagagggggaaaaagccatttgacttctcgttctctatatcttcgtggttgacgtactggatcggaattcaaagccgtctttacagtgtttccattcattctggttcctatactgtaaatagcaacgggggacttgtatacttcccttttatatggctgcctgtacgagaagtggctgagggactccgcccctgaacagaacgagcaagactattggaataagattattattgcgatcctctcgtgcacaagatccactcgatctgtggctcatacaatataggagaagaaaaataaagggggcgaggcacccttcccctgatcatctagtgatgaacagtgcatgacgtttggatctggggagaaggacagatcaagggcagcgactttgacatgttctccccggctcattcggaatactacatcttcacctgggtactgtcgagactttcttatctggctgttacatattgtgagtggatttcgtccgggccccgaggtcgagagtgggctgttgcttggcatcacgtgcgatgtatgcacgtcaggtgatatataaggttccaatatccagaggtacaatataacacagaactcaatgtcatatggtaaggaacaaggtacgatagtttattcgagagtgcagatatccattatacgctctcaactggatggattcatatttattagtgaataaagagacaactagtatacaagataaagcgccaagctaaattttcattttatgtaaaccatgacgcacagaaaatcgacatcgaggtaactccgaggccggctctaatttagcaatactaagctaggaaaatactgagatgtatttctcatatttaagattcattgagatttgagcagctaataataacagtttaagtattaccctaggttcaagactgtaattccaactgaagtcctccagattgactacatagattagatggtgctcgcagaaaaagtgggtaaagttcccccccggccgagaaaatgtggcgctcgacatcatatgagccatttgggcaaaatcaaatgccaaagctcaccaaataggcgtataagacagttgcttcttcgattcatttcgttctattgaactgatgcaaaattacctattctgaagacagtacggagtagatgaattgagaattacaattgcacgtactctgtacatagttcaagcatggtaattatgctcgaaggtgacctggatatactgattgacatattctgtacaaagccacgattcattatgatcttatactacatttgtcccttttagcctggaaacatactcgaagtcctccacttgtttgatatacctgcactgtcattggctcccgggtggtccggggataccccctcattttagagtattattattgaacaccagagtggtacatccatggatatctacttctagattcctccgtaatacttcttgagttccatgcgattgatcctacgggtcttgtagtctagatttgattgaggggcctggactagctactacactggtagtcacttccagcaagtatacccagaactgctcaattgttggtccaatcttgaatgtgtattgttttgaatttcctggagactaaagaaaaccaaatcggatgggattgtccgtacggtaggcagcgtgatatggggggataatttacacaaagcaatggaaaaaggcggacggcggactgggaagaatgtaggcttatgatgcaggaactggggatgtgggaacctcaatgccgtaattcgccttgagacgctcccggcgtctctcttcgtagccggggccgtagatacctagtggagtcagtatcggtagacaatgtcgctacccggataagaagcacataccacgtccttcacccaactccttgatggtctgctctgcggaagtctggaatgccgtgcgcaacgctgtccggcgatcgaactcgtccacggatggatctgactggtatccaaacagggtgccaccggtgtactcgaaggcggccatggcggtggaaagggcgacaccatatccgagcacagcggggagtgtgcggactgaggtaaacccgattagctccaagtacataaccatatactcaattcacttcgagaacttacctcggagaccgagaatggcaccggagaagaagccacccagagcgacgttgtagtggtcctccttctcacgcaggttggcggaagcgctcttaatgaactcataggtaccacccatggccgctttaacatgtctaatttagccattgctccatcacttataggtaaaaaagcccataccaaaggtagtaatgatgccaccgccacggacgaagacacccagagttccgacgttctgtttggtgagcgtgttctgcacagcggctgcgaagagaccgacggttccggtcagcgcggtggccttcagggctgccgaaatggcatccttggggtgataggtgttatcttcttcgtcgtggtgcgccatggtgtgtgtgctgatagcagggatggactgcttgcggtatgagatgtggttggcgataggattttggaagtcggctttctgccatacctgaccgccaccgcccacccaacggagctctacatggttatgttgatgcctctttcatattgaacattttgattcatttgctatcatcgggaatccccttagatactgcttactgccttctaagagtgggtcttgatctcaaaactgtcaagttcgtggaggagagagttccaaagcttgccagtgcttgctgccaagtgcagtgggctccccgcataccatacagtggcgatttcatcatttgacaatattgtcatcacagctgagctgttgcattgcgtgcttttctgagcttcgatgagaattaacctttgagaagaatcatatagcatcaaagcgcatattcaaactgcgtgaggcctacaggcccgaacacagtacttcatggcgtctgtacagaaggccggtaagagctcggaccagcaaacccggaatataactcgagcgaatgcttacaatattttctatcaatcatacaggaaagactgcgccacgtctcatttatgatgtccagctgtatgacccagcacacgatccagacacaggccgtaatctcctctcagaaactccacccatttatccacaaggctacaaaggcttacctggattcatatcaccagaagcatgtcgacacgaatatgccttgaaagaagaccagaccttcatgtcagaggcagagcaccggagaaggcctggtacttcgtccaaggtctcagccatatgcacaaagtgtcgttttcatcttcaagtggtggtcaactacaccagccatatgggcgcattcggtcagaaccaggggaaacacttgcatcatttggtctacaaatcaggacggcagaagcatggccttgcgctaccagaagaaactcccaaggggcagatcgcggagacgtatcactaccaatgttcctacatctcatgctcagctatggtgtctttgcgaattctttcaccgattttgagcccggaattcatccgcttgatgaccgatagagagttattgcggaaacgagcccaagaggccactgcagcgtatgctgagtccatggaaggcatgggtgatccgcagccgatcaatgtattggataatctgcgtctgtacattaccaatgccctacgaaacccacaacgcagcaagcccatttcctctgtcaataagaggttcatgcactctttcggcgtggaaggtgctccttgtaaagaattacttgaatttcttgagtttgtgtatgataaggtttgttatcaagatattgttttctcatatcgttcactgttgttgttttcgctgacgaattgactcaggataccggggcatggcacccacccaaaccgacctctgtcgccgaaaaaccttaccaagacacattgcgtctctttctcgacgacttgctgcatgaattactggtcttgatatatcatagaccagcctcggaaagaaaaggaagccagattcccgatcttccttcttctgccatccccgttatttcctgcgctctagaagcgcaagactgtgtgtacattgtgccccttggccctagaaaatccgaactaattcccgctccagatccgaaagctattcgttataaggagtttgaaatggctcatgctccgttcgtacaccctatattcaaattgataggactggatctgatacatgtttctttagtttctatgaagacctgggggtgatggaggatatgtcctcgtcgactgtggtcgaagcatacaatcgacagatctcagtcgatcctggcagaacctcgctgtacttgtctgctctcaacgctgtcggctttctgcgtggtgccgaagacaaggaaatcattgacatagccgtccagggagcatatgaacaagggaagtacaccgttgaggatgtcgtcgtcgcgtatcaatacttcaatctccacttcgatgatccaaacctcactgatgacagcatcattggcaaattctatgccttcctcagctctacaacgcaagagactgaagcacgtcagcagttgtggcgaattggcgactctaggggaagtgcgcgtattaaagcggcatcagaagagcgtgtgttgaccaagtcatgtcatttctagactttaatgtgtgctaattttgacaataggtgtttctaccgttgaacaagcgaatgtcttcttgggggttgaggatcagaccccagatgatttcgtcatgaccatgtacaccgcaaaggtatgtttctcgatcgcttcatttgtgagtcggacgccagctaatattgttataaattaggtcaatgacaacccacttaccaaagaactggcgaaacgcgccgtggcactcattgccgagtcccgcaaatcggtcgcattgaatcacttcatcaataccggagagatgattgctggtgaaatggacattggtgatgcctatcgtctactccaaatccctgatcgaactgtcgacgatggggcaatcatagccgcatatactatctgcatcgatgaaaacccaggggatgccgagagatacaatcaagctctgacgatcattgccaagcaactggacagctcgacgttgaggaatatggcaggtatctccaatgagcctgacagaagcatgaaagattggccagtcggactacagaacatcggcaatacatgctatttgaacagcctgttgcagttctacttctccgtccgtcctttccgtgagttggtcttggattttgaacgcttccaggtggatttgaatgacgaggaaaacctcgcaaataaacaagtgggatcacgaaaggtgacgaagaaggaggtcgagcgatctcagcgatgtaagttactttgtcagtgccgatggctatatgtctcaaactgaccctgtcctttgcagtcctcaatgagctccggactttgtttcgtagcatgatcacctcatctcagatatcggtttctcccggccaggaacttgctcggttgaccctgattagcccaagcaatgaggcggcaatgcgtcgtcgatcgacgataactgctactagatccgatattcttggtgaaatcaacggtgctcctgttctagggccccttgggcctccgcagtcccttctcggtgggcagatggagcccgcttcatcttctgtccaaactgatcccgtacctattcgaaacgcgaccgccagcgataacggaagcgatataacattggtctcggataacagcatggacgatgcacctggactctttattgaagacaaggagaacaaccccccagacttggaccaaatgtcggatcaagcagaagcaggatctccccaggacatgaatctcgacctagacgacagtgcatcggaaatactaccaccccccgtccctcctcgcaacctccctcaagttgatcgggaaaaacaattgaaggaggaggtggaaattggtgcccaacaggatgtgacagaagtcatcaacaacgttctgttccaaagccagtgcgccatcaagcctcgaggcattggcagtgacggtgaacagcttgaccaggtcaaagagtaagtcatgacagccgtacacgattgtacctattttaaccctctcatcagcttgttctacggccaaacccgctcttacatctccaccgataaaggcacacgttcgaaggacgaacgatggtgtgacatcaaggttgatgttgctcacggatctagaaacatctacgatgccatcgatggggcatttgatattcaaaagatcagcgtggaaaactctgtggccgagcaattcgcttccatcagccagcttccgcctgttctccagatccaggtgcaacgggttcagtttgatcctgtgaagaaatgttcgttcaaatctacaaaccatctcgggttgcttgaaacgatctacatggatcgatacatggacaccaaaaatccagatgttgtggatcgacgaactcaatgctgggagtggaaggcgtctctgaagaggctcgaggctcgccgagaagagcttctcaggacaaaggtatcgaatattctcagtcaatgtctacacggctaacatttttcttttccgtaggagggcaccggtgtcgatgttgcaacattgttccgtagagttaaaaccgcacttcaagatgtgaactccattgagaacgacgttgagaacgacaacgaaaacgacgttgagaacgacaatgagaacggcattgagaccggcaatgagaacgacactgaggccggagcggagttcaggtccgactccatgaatgctgtggctagcacggagttactggaaggtctcgagtctcttgcccacaaggcagagaccgacctgcgaggtaagagttctggcgttgctacttcctttgaaacagacgtgttgactctttttgtagctgtcgaccaagaaatccaggatacgcagaccatgatttccagccaatttgccgatttccataacctcccatatcgactgtatgccgtttttgtgcatcatggctcagtctcattcggccattactatatctacatcttcgactttgacaagaagatatggcgcaaatacaatgacgaatacgtcaccgaagtccagaacgtggatgagatcttcaagaacgactcgaccagcaaccctccgaccccgtatttccttgtttatgtcaacgatagcatgaaagaccgtttggcaaatccggtctgccgtgaggtatctgacatgtccgactttgccggtctggaacaaaccacctccatggagggtgttcagcctaccagccctgcgccagacgtgaatatggaacccccatcctatgaggaagcggcaggcatcaatggaactccaggtacgggaaacacagtatccgacccggagaccacaacatgacctcgtccggcgactgactcggagcagtcttggtagattccaatgccgcgcccctcgattcggccgctgtcaaccctctaaaacgcaagagtgttgacgaaatgaaatcgatccgtccgacttaatttcttactgtgtggcacagcaccttggacagcatgataacatgattgcatgaattctattctcgattatcttatgtctgcacgtggatattactgcattgcgaggtgtgaaatgtttttgttatccagcatgtacataggctgaagataccatggagtacttttagagtaagatagtcgaattgatctttctctctattattgatcttctacggagtacgctccgtactccgtcctgctcctttaattggttgttgtcccgggtaaaccttggaaaacatcaggtgaccatattattaagctgacttagcactcccgatttccacaagccgcggccgcggtaatcggatacggatcggctgtgatttcggcagcggcgaaaggaagtcgatccgccgatggaggttccgaagataatgagtatcaaaaaaagaatgcgatgtgtgtatgattttgcagtaatttctctgggatatttctaatagttagtcaataagttcagaggctccgggggttaaatgtattgaaatcggggcggttcatagtaggcgggagagagccgggaatccacatttccggggaaacgaatatcactcgggtacgataccgctcacactgccgtgcgggaatataagaagtggctattgccgctaccacaggcgtttgatctttttacaccttgatgtggacttgggattctttagtataatctctcatctaaaagtcgttcactatgccttcccaagtggcaacatgtttgcgcctcgcgcgtcagttctccaaccctgcccaggtaagtgatctgccctatagttctttttgagtcgtggagactgacaatgtcttgccttttaccagcaccaacgtttcattgcccgcgcattctctagcagtgtccgccgcagtgatattaacaaggtgtacccctccgccgaggcggcagtcaaggacatgaagtctggcacgactctgctcgctggtggattcgggttgtgtggtgtgcctgacacgctgattgacgctgtcctgaagaacccctctatcaatgacttgactgtggtcagtaacaacgctggtattgacggagctggtctcggtctgctcctcgagtccaagcagatctcgaagatgattgcttcttacgttggtgagaacaagaccttcgagagaatgtatgtcactggtcagatcgacttggagctcagcccccagggaactctcgctgagcgctgccgtgccggtggtgcgggtatccccgcattctacacacctgccgcctttggtaccgtggtgcagttcggtcaggtgcccctgcgacacaaccccgacggcacagtcgcaaagtacagcgagccccgcgacaccaaggtgtttgatggcaagagctacatcatggaggaggcaatcaaggctgactacgctttcgtcaaggcatggaaggccgacagacttggtaactgcttgttccgccacacagccaacaacttcaacggcgccatgggccgtaacgccaagatgaccatcgttgaggctgagcacatcgtcgagcccggcgagattgatcccgctgccgtccacttgcccggtatctacgtcaagcgtgtcatccagagcactttccccacgcagattgagaagtacacctacgccaaggaggagggtgctgacaccgctgctcttggtaagggtgagaccgccaacaagcgcgagcgtattgtccgccgtgccgctaaggagttcaagaacggcatgtacgccaacctcggtattggtatgcccgtccttgcttccaacttcgtcgacccctccatcgaggttgtcctgcagtccgagaacggtgttctcggtctcggcccttaccccaagaagggtgaggaggatcccgatgtcatcaacgccggcaaggagactgtcactctcaaggccggtgccagctgcttcggcagtgacgagtccttcgctatgatccgcgccggtcgtgtcgacatgaccgtccttggtgccatgcaggtcagcgccaagggtgacttggccaactgtacgttttcccgcaattccttcgtttatgcatataactaacattttctcacagggatggtccccggtaagattaagggcttcggcggtgccatggacttggtctccaacccctccgccacccgggtcgtcgtgaccatggagcacaccgacaagaagggtaaccccaagattgtcaagacctgcgagttccctctcactggccctgcctgcgtcagccgtatcatcaccgagctcggtgtcttcgacgttgacactaccagcggcctgactcttattgagatcgccgacggtgtcaccgtcgacgagatcaaggccaagaccgatgctcccttcaaggtcgccgacgacctgaagcccatgctgtaaattcgcatgcacactgtacgattctttaagcgttttgtatatagacattaggagttagattgtttcaaattaaggacatatcctggatatgcatcaagaggagcattgctctgacaaaaattcatacattcgagtagaaaggatagtactagttgtacaataaacaaaaaaagagcaaaggtattggtacatgtcatgcaacccatcatataaaaaaccccataatgctgacccaaatccagtgagacaataatacatcaagttttcccaagtgtttccaagttttccaacgtcaaagaaccaaaagtctatacataacagcaagaagaaaagcatcacgtcaagcggataataccagccagtctcttccgtaaccggccaaaccaatcgcggttcggtgcctctgcgaactcacggatgacattgtcatagtggtctgggttactagctggccggcgcagcttctccggcatgggatatttacgcgcgtagcggttattcagcagcgattcaagtgcattaacggaggactcggaaattgctgggccggacttgtctgcggacttgagacgggattcgatataggcttggacggagactgaagccgggcggactgcgtcggaaggccaatgcttgaggatgtgggtgaggcgactttggagggagcgcgggttgagggcctggatgatttgttaggagatttgtttgggattgagcatcggggggcttttcgatggtgttgggataattcagatgttgggtaagatactcacaggtgctttggccatggtggacaagcgatatcacacgataattgtggtctaggggaaggatcttcctcatggaagttgaggcaaagaccggaacagtctattttggcctggcgcatcaggcatcaacagccacatccattcctgttgccttctcgtcgaccccgtcattttgccatccccttgtactctcattatatcatttttttcttttcgccctaagttattcctgtctcaatttcctttctgattctattcagggtcgcttcccgctcagctcgccatgagctcgcagcgctattcacgggtacccaatccccctccccgctgatcccctatcagaacaagccccttggatgggatccctcggcaacatactgaccgcgactgtctaggtgaatgcccaggatgaagaggaaggaccacattcctatccgctgaacgcgcgacctgaacatagcaactcttcaccttcgtctttccgttccggatcccgctcgtcgtcacgatcgtcaaggcggctattacaccacgatccgcaacacgacgatgacgaacagacactcgccgatgcttttggcgacgaagacgggtccgatgatgataatgagccggatgaccgacagcgcttgatgcgagcagactccgacttccgtgctcccccggataacggccctaccaccacggcctcttcgtcggactcgagaggcgatccgcaggatcagattcaatcagggcttctcaggcgaccgacgctattaccaagttttacgaccccggcttcgggagggagtcggcagatcgcctcatcgaatgatggagtctttgccaatcttgctgccaagcctgaacggggtgagaagaatgatgatcttcctcctgtaagttgatcattgatatttttgacccaaaaagaaagacttatttactgatatcttatagtcatacgaagaagccgcagctgatgcgacaccgccatattgggagaccaccattgtagctcctggtatctcgtcagacgaggtctatgtcgatggattgcctgttggatctgttttctcatttatttggaacgccatgatttcaatgtcattccagctcgttggcttcttgctgacctatcttcttcacaccacccatgccgcaaagaacggcagccgagcgggtctcggtcttactcttgttcaatacggcttctacatgaaaggtggcagcagcgacagttccggctccgagggtggaggctccgaatatgtccctccacctgaccccaacagccacaacttcgaccctaattcggttggtgagggtgggggtaatggagggaacggcgccatctctggcatcagcaccagtgaatggatttcatatattcttatgattgttggctggttcatcttaatccgtgcggtcagtgatttcctgcgggcacgacgtcatgaacagcttgttttgcagagcccggatcgtggcttgggtgtaccagtcattgcagagggcgaacgatccgagactgttgtctaatatcgatatacggattctcacttgaatcaattttttttttgggacgtggacatggacatggacatggaaatgtctggcgttgcagcatggagtttcttattgtatcgacaccccctaggagtactgcctccggattgcattccttcaatttttcctttcactttatcacaccattttatctttgtctctgaccgtgtagctattctgaagataccaaatatatgaacaatgaaccatagcagttatatttatgtagtgatgtcaaccctaagtcgagtctcctagaattccactaaccacttcatcagcttctatgatcatcgcactgtttcctcattcaagattccttctagagtgaaatatcccgcagcgccacccattctctctcggctacaggtccgtcttatcattttatgccgcggcctagtgcccccagtcatagtgcgcctactacagtgcccagcacccacctactatgcgctctcagttgataggacaatggtccctcgttgaacggaatacctatataggatataccttgcctttacacctagtagcgcatccgagaaaacgtagaagcggagaaagtactcatcgctgctccagtatggtggtcttccgcactcggatcaggcacaccgtccagtcgcaccaggcctcgggtatatcatgcgcgtgcaaagcgtcgagggcgaagtgaggatctcttgatgacgaagacgtggcgacggctgtctaaaaaaagaaaggcgctctcagagcgcgtgcgcaggagtcacagaggtggctgtttcgtctggcgttggaaccgaggaaaggttgttagggttagaagggcttagattgggcgcaaaatataaatatggatgttgctgtaacatagtcgtcatggatgaggtggaagttagtggaaagtgcggctttcggtgaatttctttcagtcacggggggtcttcgggggattgacagccattcatagccccaacagcggtaatttccagcgtcaattgtattggcgaccgcagattccatctatattgtaggttgttacaatagatagtagatcccaacgtaatcgcagcccaagggttgctgcccgcgcatactgcgccacgataggcagcattctatatccttgtcctttgcccttgcattcctttgtttctcgcctgtgtaacttcaccccattggatgaacagaaaggagcgcagaaaagaagagaaaacagaaaacaccaggcccttcttcctcggcggcatgaccaactccgcccactgccgagagacccattgtttatttgttaacctcaaccccaacataaccccagtctttctataattcacctgcgttccttgtcggggtggatcgcgggcttgtccgcaatgtctaccatccctcagggccccgttgaggcacgatcactgtcgtcggttaccactatcgcatcaaatccccccgcctatccgcgcaatcctacccacgagaagcacgaaccactctctctgtacattgtgcgtgtgccaggaagcaaaggtatgagtcaatcccatattgagactatgctctctttcttttggtcttcaaagccccatagttgcgcgttaccgtgctttaacaaccccccaaaaaataaaccataactaactgctatttatatgtgcagacatctttctctcgcctctcaaaccaccgactaagtctagtgtctctgctgaggcgatcaacgcctctctttactatctccatgtcgcgactcccgacgatgataccctgctccaggaagtagaagaagagcgcgcagaggaggcccaattgcgaaaggaacgccttgagaaagcgggcggcgatagccctgtacaacacgagttcgcgcggctgaacaatgtgcgccggaaaccagttggtggaggaggtgatcccaaccccgagcgctcgccaacaacgcctcagcaagatgccactgccttgccatcacgtccgatccctgtgttgcaggataaacctgcctctcctgccttgccaccacgtccggcctttatgccgcatgctgctgcttcgccgaccttaccaccacggccaatctctatgccacatgccgctgcttctcccaccttgcctccacggccaatccccatgccgcaggttactgcggaaaatgtatctttctctggaactccagtggctaatatacatatgtctggaggtgtatcaggagagtctggtggtaagagcggtattcggtggcgacctttaccttccttgccgcctggtgaagagtcatgggccaattctccagcaggcgaggacccgtctaagaggacatcccgatggagcgcgtttgccgaacaattgcagagtcgaggagagaactggaaggaaaagtatgaggcaaagtacgaggcgctgtcggctggccgtcatagccttgactctactagaccacaattgcggccgcgttcctcgcataaccgtcccggatcaccattaggaagtccgggacaatctcccaaccgccatagaaactcaaatggaaaccctcctagcaatgctggctttcatatcacgctcatccgacgcgatcccacgtccggtacacaatggaatgtggcaactatatcaaccccacgaatggaccgcaataccgtcgatatcgagatctccacgccggggtataacaggttcgcaggctccaatgagttgccttcattatccaacctagcggtcaatattccgacagggattggacgcctacccaactctgccattcctcaaaccttagccaccgagcagtcaaaggagcagtcaaccggcccacgaaaattccgccgccagctctgcgtatcgaagccattcgacgactccgctgccacggatctcagcaacggccttaaccaagatggtccatcctccaagctaaaaagcggctactacgtcttcacgtctccttggaatggcacatgtaccttcacaaccagcgtgaacggccgaagcctcaagtgcaaacacatgatcccaacacccggcggcttcatccctacaaacggtgaaacagaagcaccccccgccgtaactgtcgccgagctccgcttcaacacccccttccaagcagcaaacctccactcgcacgcccaccacgcagtccacaaaccgcacccgaaccacatttcccccttcacccaaagccaacttcaaaccccgaccatcccccgggcaaacgactacccaaacgacaacaactcctacgaagaatccctccatccatccatctccaacaacagccacgcagccgcaaagcgcaatcctctcacccaacttctcaacccaaacacctacacccggccgcgcgcacactcaggcccaggcccaaatatcccacctctcccggcctcgcccccagcagactcacgtccaaatttcagcccttcaaccatcctccgcagaacctccatgcatgcgcaccgcttcgcgcgccatagtcagcatcattctacttctcagtcgcattcgcaccgcagtacgagtaatagcagtggcggggatttagatcacgagtctgatgaggatcgcttggacttttcgcttgcgagggagcctgctggtggtgggttaagggggaagagtgccaaactggggaagttggttattgaggatgagggcattaaaatgctggatttggttgttgcggcttgtatggctgtttggtggcgggggtattattattgagatatattgatcttttttgatataagatatcctggcttggtctctagggcgagtctgctggctatagtcggttagttttgctatgatagcgtatatgaatatatgaattccattttgtctggtctaattatccctttgtctgatatatgctatttccaaggcttgcgatgatcgcttgcgcagcggtacgaagttcactgaatcacttgtctgtatcatgtatcgcaccaatcggcggaggtatctctatctccccaagctacaagatggcctcctatatgtagcctggccttagaaggtgctagtatggcaagtttgaacttctgtagttttgcctatcaagggttatacgtagagaagttttccacatttttctgctgtctatctataatacttaagaagggcaagaatatgcctatcaaaaaagatcaaaaggacacaaagaagacctcaatcgagccaactagatcatgtcgttcttaacgatagaggcaagcgcggtcgacgtgataattaactaggattttcacatatgagtaacagcccacatgtaattcagtactgcaggtcctagactgtaggtctacaggttccagggttagtgagcacattgcatagccctaactagtactccctactccgcagatgtcaagtaaataaaaagtggattcgtcgacaacgccattcgaaacccaaccgtcagccttacagcataggcacatgacttcccaaaagcgtaggaccaatcacgttacactacaaaggcccacatcccatctccataacgaaggacctgtaaaagagaaaaaaaataggtagcttctctttgattgagcgtgtcatccttagtgcaggggccatgctaatcttctctgtatattttcatttgaccatatgccccaaagggcgaagtatctatgcgttcagttcactataacctccatttgggggcagaacgttaccgcctacctgttttggtgtgtatcgggcgattaggcacgtggcttggcacgtggactttcccgaacgggaaactatgctccatagttagaggtggaagcttggatttgataaagagaaatcgggtgattagctagcaactgtcacatacagagtagtactatgtacaaaggccaatgatatgtttgagctacgtgttctaaatggttcctcattgacagacagcagacgaggggggagagttgattgacaatctatctaatgatcctacttgaaagagatgcaatgcaccgagtaatgacatagacagagacccaagtatcatatccagaaaccacaaccaatggcgccttgaaatttggaagtagtcaaaggagtcagacatgaacagaaggttataccaaaataaataccaaacgcagacacaatccaagctataacatcgggcgagagggcagaccgcagaacctcaaatagagatgagaaagtcgagttcgaaatcgcagttataatgatgaaaaaaggacccccatgtaaatcgtcccagtcttttttgtttctctgatggtatctcttggctaaattagatcaacatgcagggcgcggtagaagacacgatcggatttcaacacgccgaacaaccaacaagtcagaaagaagaaaataggtatcaacggtgatgcacgtccatgccgcgctgcagcgaggattccaagtcattagggttgtagccaccgccagcggtagcctcctgaggtctaggatcctcggtcttccaaggaccctgttggttatctggaatggggatgttagtctgctgagcgacctgctgctgctgggcggcgtgggcctgcgattgctggcggacggtcgcacggaagcggatgacctcgtcgagaatcatcttacgcatgtcgggaacttcctcgacgacctcgaagtggaagtcgaaggtcgtggggcagttcggctcgtcggaggcgtcgtgccagatatgcaggtaggggtgctcgagggcctcctcgacagagatacgagacgatggatcgaacgctagcatgcggtccaacaggtccaacgcatcggggttggcttgagggaacagctgcttgaaggccactttcggcatgaagggcaggttgcgcacgtattcctgggcgcggggcgatccaatgcgcgccagggtctcttcgttaggtgtacccaggtagtgcaagatctgattcagctggtcgacatagtcacggcccttgaagaagggtcggccgccgaggagctcggcgaggatgcagcccacggaccagacgtcaactgcacaagtggggttagcggggattcggtggcaaattatgcatgccggtgttacatactcgctttggtatagctctggaagctcagcatgatctccggtgcgcggtaccatctcgtcgcgacatattcagtcatgtatcccgcgttctcctccgggtcgattgagaacccacgggccaggccgaaatcacagatcttgagctcgcagtccgcattgaccagcagattaccgggtttgagatcacgatgcaggacgttggccgagtggatgtacttgagaccacagaggatctggtagatgaaggattggaagtgggcgtcagtcaaaggctggccggagcggatgatagcagccagatcacattccatcaattctgcaggcttatcagtccagctctattcgtcgcaaagcagcagaccacgtaccctcatagagatatgtttcgttgaagttgtccggtcggggaatatccatatcgtacaggcatgtaatctagagggctgagttagcgcgtacaggtaatgataaggatgatctgcggcctacattgcgatggccacggaaatgctgaagcagcttaatttcacggagggcgcgcttggccagaatcttcttgctgaagacattggtcaccttcttgacggcgacaccttcgccggtctggatgttggtagccgcgctgcattatgccatcagcacgtgtccaacgagtatcatccactggcatcaagacctaccacacgataccataggctccctggccaagctcctttgtcacattgtattgctcgctcacgataaagtcctggttgaagaccttgaagaccttgcgaccttgtaaatcagccatggtgggatgtcgcgtcggagagtcgtagagtgttagaaggaaggcaaggcgacgaaggaaaatggaattggcgagggtccaaggtgtcttcaaaaacaaaaagagagaagttgaaggggaaaaaaagggtgaagagtcgagagaagtgtgatgagtttcagccccgcagtccccgcgggtgatccgccacgcaaaagcgtttaagtccactatcgctctgaatgaatttgaagtttcaaagaagttctaaatttaattaggaccgaaagacctactgtggaagacttggaattcttgaatatccaaagattaattcatttcgccgtcgaaagagtgaaatagagtctattcctttgtataccgtctccatacagactacatatctgcgtcctcgaaagcaaatcgaacaaagacttggaaagcgtggctgaaacatgtctttgaacattttctatgacgtctctaaggttctacaggaaccagtctaaaccttttagggctacgaagaattcattcgaaagaaataggtgtattaaaggatatacacaaaggacgacagacatctcaggagagctttatccttttgcttgcagggagggaaaagttcaaccgttgctgtctcttgccagggaatagcgtcttcaatgtcgacgcctgccagtaaacccgcctgctggggggtttacagaggtcgacgaacagtctcgccagcaaggctaattgctgggcgtccaccagtgcgcggtggttacgccctgctagaggatgagtatctccgaagagcaaagcaaacaccaaaggtagcttgagaggaaatgtcctgcctttgaagcaggtacgaccaagcacccgcctcacgttggtgtggaactcttgaaggagcaagcagacattctcatctccggggagaacacagccaagaccttcttgccgcagccattgtcttaaatacgacaggtcgaaggaccatgacctccaagacaggaaaaagggttggttggagataccgactccttggggtttttcaacgacctgctttacacgaaggcggccatccgacgtaagatactttttgaccttctcttcatacgacatttgcaaatgagctagaggtacagggctcgacgaggaaggcgcgatgactccgtcactttatctggcgatacaattgagtactcctttcccttcgatatcagcgaggccaatttcgagcacctctttggaagtgaaaccaaattctaggtcgatattcaccaaataggaaggagggatattggactcgctgtcagattccatcctcctgatgaggttcaccattatttctgtctcgggacgccactgctgagaagacgctgtatcgaacaaagtcctaagctccttcattgcggcttcatcgtagacgaggagttctagcgtccagcaaagaaagtgttcacggcaaagtcttgagccctcccacgtaaggctgaagcacctcttatggcagcacaatgattgcttatcgcctgcctccagaaaattggatctcaaaaactcgttaaacacaaaccgcccattgcagggtcggcatttgagcccaatatgctttctttgatgatctttgtaaaaaaacacctgtttggaacgtgattctcgtgctatttgagcacggaataccaagcactaatccctcaacgacccttcccggccccgggcacttaaggccgaggtgaagaaggcattcagaccgagcagctaaattatgagaattagcaatgggatatgaggtagtaatatcttgtatgtcttactttttctgagtctgtcttggtctttttgcggatcgtccttctgcgtatctttcaacctcctggctgcccacttcgtggtcgcttcatgctcggaatcctcaacttagtcgtcggattcactttccaactcttcctcttctccgtcctcttcatcattatcaactttgtcgttcgcggcttcactctcacaatcttcgtctctgggttcattctcggcttcaagattcgcaccggggacctgtttttctcatgagtaatgctcatttgttctttcgttgttacataccttcaaaggtttgcattccccctcttgaaagtgtcctcgttgaacatgcttcttataatgggctgaggcggcaacctgtgtctgcttcctaccttgtatttgagaaaagcatcggtcgaactggcacagccacctgggcttgggataatgcttattcacatgttgttttgcatcgtagatcgatgggaacgtttcgtcacaaccgaatgtctcagcgtactcacggggccaacgagccctcatatggacggccaagtagtgcttttttaggttgaagtaggttaagtatgttgtgctgcaacctagctctgggcatatccacctgccatttctgtgggagctcgtcccaatcaagtatgatttttccatcgacatctctgaggggaatatgtggcgatgtcttgggccacgccggaataaatttcccatctggctcaaatttggtatgttttgtttgagcatgtgcttttgcattgccctgggaagaaaatactataaagcatttatcctcctgcgcacgtggacaaggaaactctttctctccctgatcaccatgagcgttcctcgcgtggcgttgggcattgtgcttgtctgtaaatttccaatcacaccatttttcgtcggccaggggacaaggccacatgggtttcccatgtacctcctccgcatgtcgagctgcacttggtctcgtggcaaatcttttttcacacttgatcctatttgcgcctgggaaggggaatcctttccctcctagggagcgtcgcgatctcttaccaccatgttttctcgcttcgtgctttttagccgcacctttgctacgaaacatctcggtacactccttctctttggccaagggacatggccatctgatacgatgatgttccctttcagaatggaagttcgcgttcccttccgatgagaaggttctatcacagttgagatcctttgcatgtggacaagggagccttggcctaattcccccactatggacaagctttgcgtgctttgttgccgtatctttggcaccaaattccatagtgcaggacgtttcctctgccaacggacaaggccatctcacttgctcttcgtcatgcttctcagcgtgcgcctgtgcatcatatttataagagaacttcttttgacaacgaagctcctctgcgcgcggacagcgccatttggcttgagcgtggacttttgcggcatggccatttgccctccgtttcgagtaaaaggtctcatcacattgaagttctcctgcgcgcggacatgggaagacttcgtgataaaggtttgccgagtgatcatctgcgctagcttgagagctgaacctcctgtggcaatgaagctcctctgcacgcggacatgggaagcccctgtcatgtaccttgacatgcttgctcgcgtacttctacttctttgatgcgaatattttgtcacatccgaactcttctgcgcgagggcatgggaagggcttctccttcattggtatgttgatgaaagtggttggtggtggtgttgaaggtgtagagacttcattaccctcaccattcatctcacccattttagaccttatatttatcatcatcctatttgatctgctctctctgctgaaggtaacgagacctccggatgatgccaatgaggtccaaaatgaatggatgagtggttgaggggtgaccacagcagagcgagcagtatgatattccctatgagatttaaaatggatagatgagcaagaaggaaatgaaaagagctggaaagaggtgagcaataagagaggggatgaagagagaaaggtgattaacaaacacttcattaacaaacaggccataagcaaaccgccatacgcaaatactgcggtagcccgcatcctcactttaacagaagggtgtagtgacctaagcaatatacaagttaccgagtccgtcataaaatcggacttatgattttatgatttgagtatgcctttgaaaccgcctttcggttggctcttttaagttgtctttatggctgtcttttttggtgttttattcgtgcctagacctcggaatttcccatgggaagatccaatttggccgcctaattctagtggccaactagagggcatcccctcaaacgatgagctagctgctcgggctactctcgcggtcaaggcttcgcgcagctaggtgggagaacgctcgccaagtaacacaacactacaggctattttaaagcgctacccatgggggcagagatgagtagtcaagataataatattaattaatgatggctgagagggagagaaccaactacgcaatgggaaatatggctgtctcagacgtagcacatgcatagtgtcaacaaaagatgctattttgacacataggataaaatacgcaaacatatcttaaagcttgatttccttttatgggttcaatctacaaagtctctgctatatgaagttattgggttttgataaagacagaaattagggctaagaatgatacggctgagtatagggaccagaagggtagaaatttcagagagctaacgacggtacatactcagtacgcttcggccttttctgataggggctaagattcgaatagactgtcgaccagaaaggactcctgtaatatcgttaatatccctggtgttgtagtattagttgtatttacgcataaacacaattatactcattttagtttttagaccaggatcttttcggcagaaaaatgagctccctttgttcaacataggcttccctatatttagagtcaaggaatatcggtctatcaagtgtgtttcagaccctaattactctactacattaggtatgtatggaatattcaggagaatcagtagaatatccgcatgttcttcatttcacttttcacttttcgtaaatcagtaacgaatatgtcccctacagagtgttctccaaccgacgctccttgcgcagtgctcggagcttgacccgcgcctcctccagagggaccatgatgcccttgttttgggtcgcaggatcatcacggttgcgaatgttgacagtgcgtgcctccctctcctgggcacctacaacaaagataaagttgtactgggccagctggccagtacggatcttcttctgcagcgtgtttccactgatgtccacgtccacatttaacttgtcgccctgcagaatacgctgcagctcctgggcgtaatcattcaaatccggcatcaccggcacaataaggacctggcgcggactgatccagaacggccacttgccaccaaagtgctcgatcaagatacccaggaatctctcgaagctaccaataatagcacggtgaatgacaacagggcgggcgcggccgggggggagatcgttggactcgccctccttcgcgctctcctcggggttcttctcccggttttcgttggtctgatactcaagcttgaaattcagcggagcctgatagtccagctggatggttgcgcattggaattcacgcttgagagcatccgcaatggtgatatcgatcttgggtccgtagaaggcaccgtcaccctcgttaatggtccaatcgttacccttaaacttggttaaggccttcttgagctggtcctcggcctggtcccaggtctccaacgaacccatatacttctcggggcgggtagaaagcttcaacttgaaggtaaagccaaacagaccataaatggactgcaagaaatcgaacagaccctcgacctcggacgaaatctggtcacgtgcgcaaatcacgtgactgtcgtcttgactgaatttgcggactcgggttaatccgcttagggccccggatgcttcatttcggtgcaggacaccgaagtctgcaatacgcataggaagctctcggtagctgcgttcacggtgaccgaacagaatgaagtgtccagggcagttcatcggcttaagagcccactcgcgtttctccacatccaacttgaacatatcatccttgtagtgctcccagtgtccggaggtcttccagataccaacgtcgtacatgttgggggtctggacctcctggtagcctcgcttgcggtattcagaacgcaggagagactggatctgattgagaatcttggttccgttggggaggagaaatgggcagccgggggacacctcatcgaagaagaacagctcttgctccttgcctattttcaagtggttccgcttctcggcttcttccaagaacttcaagtgctcagccatttgcttcttgtcggggaaggcaacaccacgaatacgctgcaaagagtcgttggactggtcaccaaggaagtaggccgatgagttctagaattaaaagttaatgtgtctcttactcagtcaaggggtcgaacagtcacgcttacctgcatgatcttgaaggccttgattttaccggtgttctgaatgtgagggcctcggcagagatcgacaagggtaccgcaacggtagacggtgctgctttcaccggtgacgagcttgtcaatatagtgcagcttgtatttgctgtaggcgaacatcttcttgagattctccttagaaacctccaatcggtcgaagctttgcttctccttgaagatgcgcgacgccttattgtcaagcgccttccagtcagcctcgcggacaacacgtctgttttgccatgtagattagcattggcgcagttgtgaatggtaggtgataagataacatacccatcaggcatggccatgtcatagaagaaaccctgaggggtagggggaccgtgggaaagaagacatccatattcgcattcacatgcctcacccagagtatgagcactggagtgccagaatacatcacgggcctcggggtcgctgaaaggcacaagaagcacactgcagtccctctctagaggccggttcaaatcccacaattctccatcaaccttggaaataacgatattggcgctgatatccttgggcacatcgcgcaggaatgatccaggggtggtctcgaaggccttagcagggactgaggagggggggttgccgtcgccaatgtcaagggtaacgttgatctctgggtggggacgagtcttggtctcctcgaggtattgttgccaaagttcttcgaagagcttgtttcgctcaagcatgacttctgggagagtatcggggctcggagcctgcttgggtttcgctttcgcatcttttggaggggcagccgcagcttcagaggcgttgttggcctgcgcttcagcggcaggccgtacggggatatccttgggggtttcggatgccatttttgaaacccttggagcaatagcgcaagggaactagactgtgagcaagagcaagaagtctaatcgcggcgtggaggggaaaatgactctttgtgagggcggtgaaagataagtctcgaagtcacgtgatggtactgcccttagccgacactttaccgcttcaagtttccaccaagcgaaaacttctccagctttgtacaagtcaatcacctttatcaccacaaaatgtctttccgtggtcgaggtaacgcttctggtgccaaccggggaggtttcggtggtggccgtggtggtgagaattttccaacctgaatgcgatgcgagaagttaaaaggagctaacgaaatttttttgttgcaggtcgcggaggcttccaacagtcattcggccccccagcccaggttctgggtaattattcttctgaacctgactgtaattgattcatgtcgctgatatgccgatagagttgggttccgtgctgcactcttgcgagggtgagatggtctgcgaatcggtcaaccccaagattccttacttcaacgctcctatctacctggagaacaaggtacgccatgactgccgcaaaccattacaatttacaagtccatgacctaactgggttatagactcaaatcggaaaggtcgacgaaattctcggtcccattaaccaggtctacttcaccgtcaagccccaagatgggattgtcgccacctctttcaaggctggtgacaaggtctacattggtggagacaagctgcttcctctcgagaagtacgattcgctgttctactcattcttatatactctgactaactcacctcttaggttcctccccaagcccaagcctcccccaggagctgctaagcccaagcgcgccggtggtggtgctccccgtggccgtggtggattcggcgccccccgtggtcgcggtggattcggtgcccgtggcggtgctcctcgtggccgtggtggcttcggtggtggtcgcggtggtggtttcggtggtagcggtggtttctcccgcggcggcggcggcggtggcttctcacgtggtcgcggtgcccctcgtggtggcggtggcttccgcggtcgcggctactgatcgatccaatgtactgtctctttttggcgttttgggggatctgggagctttttcaggaatatctttccgtcttcttgtgcatcctgcgcaattgcaacttcactggctgcaggctgtagaatatcaccagtcaaaaatgtttctgttatttttcattggattttccagaacttgcaattaaaccataagacattcgtttagagattcggggatgatcggctggacatttggttgggatgtggctagcagatgtggcgcagctgcaccgcccctgcctgcctgcagtttgaaatgacgttgaccgctcagcgaatctgtgcgtctgtcaacactcccaagcaggattgacgacatttttattcttcttacccaatctcgccctttagacattttattgagacagagtatccttttgccgtaaaaattttcgaatctgatatccatttgagcatgtctcgtcggacatcgaccatggcatcgagcaattcttccagcggtgtcccaccttcaggcgatggaggtgtgtttgagctccctctgatcgtgcattggcaatatagctgacatttttcaggtcaggagaaacagaaaatgctactttcctcggatcatggtcatttcagcctggtgaagtcagtctcgtgcttcccgcgctcctttgccctcggttcagtctaacactcaacagggccatgcatcttgctgatctgattactgaaatgaatggtaagagatcgcaagatcttcagactttgtttgaattgactcgctaactctatcttaggtttctgtggaggcaagctcatgttccccaaccgtttttccaacccgcgactaatatgttgagcagtcatgtcggtattctcctccatgcgctactgcctcggagacccaactgaatacggttccatctgggctgccctcgcattcatgcctttcggtttgttcttcgactttatggatggcaaagtcgcaaggtggcgcaagaagtcgtctctcatgggacaagaactcgactcgctagctgacttggtaatggatccccgcgaataaccacaagcgagtttttgctaacacccttactccactagatctccttcggtctcgctcccgccgctgccgcattcgctcttggtatccggacctcgcttgatcatgtcttcctcacattcttcgttctctgcggtctgacccgcctcgctcggttcaacgtgactgttgccgtactgcccaaggatcaaagcggtaaatccaagtacttcgaaggcacgcccatcccaaccactctttcaatcgcctctgttatggcctactgggtctctcaaagctggacgcacgagaacattcctcttggacttgtcgcagagggtaccatcttcgaattccaccccgttgtcttgatgttcgttctgcatggatgtatgatggtcagcaagacgatacacattcctaagccatgagctcaacccatacttggccgcgcatttactgttggaaaaaaaatgcctgagtctgttgtctctctcaacttggacaactgaaaataaatatcgagaggggtttcgtttgtaggcaaggcatagcatgatctcgatgcacttaaatatggatgcttaattgaatttcaattgcatagattggctatagtcattgtggtttctgcgtagggtggtcaaggtcaacatattgaagacgtagctttcggcaacagcgcaacccttgtaagcaagtgagccatggattctctgtcaaatttaacagcgcgcaatgcacaagcaatgctgaccactttcataattccatggtcagtacacgctgagaaatcttaaaatgaggtagggacaagatagaaatatcaatatgtaaactgacactttccctggagggtacgccttctgtgtgtgtggagatatatccactgttcatcatagatattgtatagacatccacgcaatgttgacctatagagatcgtcataatgaccactcgactaggtatctctacagtccgttcaacgaagacttcaatacgacaacaaatcatctctgaacacagcaagctgtagtgaaggcatgtatacatcctccctattaccagctcgtagatcgcattgcatctaatccaaacactatagcgaaccaagcctaccaccaccacccgtggacaactccaacgatgaccatcaccagactgagcccccccaggtgcccccaatgctacagagatggcataatacggatcgtcaacggcaacatcccgaatggcaatgcaggtcgtccatattatatatgttacccatgtgatcaattcatctgcttcgctgatgcacgcgggataggtcccgctaacccgctctgccaatgcggcgagtacactcgtaggcagatgtcgggggcgccgcatgggattcattatgtttgtgctcggggatggtgttggttctacgagaaggagatggagatggatgctgtccagcgacaggttcctgccaggtcggtggagatatgtgcgaattactcttatatctgagatttgaggtttggtttgggtttgggtttgggtttgaggatgttattgtgtttgttcttcttttaaggtggtttgatttccgcttgtcgtgattttagttttaatgctgaagcctgaattaagtacccaactggttatgtctcttctccgtaagcaaaacgatactctctcttccgaggaaagcattgagccggcccatccgcatgctctagaacatggcagctagcatcatcgaaggtcacaggcgaagtcggaattttaggatttaaaattagaatagcgttgacacttgctaggcatacagggaggcacacagggtctagacccacagtttcactttgatatctgaattcgaattttcattacccacctagggttcgatctagacggccaaatacatacgaaagattcaagcaaatcaaatagagtcgtttatctttcaatttatattctctcgtggaccggtaagagaattcgtttctacatgatccctttgacaggtggagaatccgactggtctagtggacgccactggtcccggaatatctcagtgtggtccagccggtatttccgtcgataaggtctaggcatgtgtgcttgttgacatcttactgtagagtacggagtatgcagtacagacctgtattgcctgtgtatgctacgtttttggaggctcttggctaggatgtcgggtcagacccgatcatgagcaatatgtctcactgttggaagatcgctcatccattgagcttttattgcttattgtttgctttgtgggctatagagttagacgtgggcgcctttagaaggggaaagaagggaattgtgtcgaggacatgagttggctataattatcaatcgtgggcaacgagacgctaagttacctgcgcaggcaattctgttgaccgttgaggagtttgattcccacatagatcacgaggttatctggcagttgcaataataatagaatctctgactcagaataggcaagggactagatctgcaaggtacagccgatatattacacacactcgatctagagcgcatttggccactagtaactttatctctctgttcagtaaaggtcttgtataattctcgcatgatggtaatgtggttgggttaataacctccggtatctcagggtttgttatgagaatatgtagacaatgctatgcagtcaagtcaggaacaaaatacttgaagcaaataaacctcgagaaatacaacatatcatacaatatacaagacaaaagttcaagatcgaacccaaccctaatacatgccatttatagaccatcatacaaaggtagatcttgagccgcagccctattttacgagtcaaattatgcggttttttgttacaggaacggtacggcgtattaccgtagggacagatcataatttggtatactccacccgggagtggccgcgcattacccatggaaactatttggatacgtggaaaagggggcatgaacaaggatatagaagaaatcgattgagtacggagttcttgcgattacatgaagtataaggctaaattccaattgctaaatccttcatgtttcatgttgtatggagtatggagtacggagtaacgaaggttattatcccttgtacggagtattcaaattaactccgcctaggaaatgagccctgaaatctctttcaacagcaaactctgcaatctatcaaatggagatctaaatttaccctggacaccagccaaggatacaattgtcagccacaaaggaccgtggcgtatggtaaccggtcatttaaagcgaaaacacaacagagacggatcaaaagcatcgttagccgaggggtgcgttgtacaattttgaggggtaaaacactccgtcgtcatcaagggtcttcttcatgtggcgaaggatgcaggtaactctgtaaagtacggagaaatacggtacatactctgtacgtgcatacataatattgattatccgtcgaggttcacacaatgagggtctcataatcaccgcttggcacccgaagaagactagcggcatgtccaaggactccatccagctcccgtgtctgacccaaataggaaaatgatcaaccacagtcccctggcttaccggggcaggtgcctgattacctaaatatatgtcgacgtctcattggtgggattgtttgtttgtctactttgtacctggtattgtaccatacaaggagcaaacaaccttgaaacgacccgcgaaactggtgggctgaaagtattcggtactcgggtacaccagggttagcctcctatgttccaagtacctggtacataatgtcacttctccggggaacacagaccccttaacagtccctttctcaagggatccattatccgtcacttcgccctcctgatcttcctcccctttgcacacattcgttactcgatttcttcgctcgtttactccctttattcgagggttatcaactgaattgctttttacttcacggtcgctcactctctcccgacttgtagggggtgatcctctactcgacaacgtactccaggtaccaatcaacacaacgcgaaatcaccttcttttcactctttttccgaccgtcaaagttcgactttcgaccatacgccctgaggatctgaccgaataattcaggcccaacgtggtagacacttttgagaacaaacgacgtctactggcatacattcaaacagaagttcttgagggttacgcaggccgttcccagtccttcatcaatcacccctgcgactgtgtccagcggtgcttattctcttcgttgatttcgatactcgaattcactactctcccaacacatcatgcttttcaacactcatggcgccctcgtggtgtccggtgtggtgatggcagccgccgcggcagttccagaagacttcaaggtggtccgtcgtgcgccgttagggacacttcaaggttgttactctagcattcctggatatggaaagtcaacaggctggacataccaaagttccgggtggtgtctggaccactgcgccaaagactacgcgacattcgctttgacaggaggctcagactgtgtgtgtggtaatacgatgcccccagacagtgccaaagtttcaagcgacaaatgcaacaaatcctgcagtggctggcctgatgatatgtgtatgtctatgcccctccttcatcggtctcaaagaattgacttgctaacgaaattctataggcggtggtaccggctactactctgtctataccaccaatttggaagacgacgttcccacgtactctgaatccgggtccacgaccaccacatcaagcacgagctcgagcagtaccagcagcaaaacgacgacgcaaaccgatgggtctacaactgctcccactactagtagtagtattagtgaagttaccgaaaccgccacatctgagcctaccacgagcggtctctctgaagaggatatcaatgaacagtcctccaagggcaagaatactgccgcgattgcggccggagtcgtaatcggagtggtcggattcgctgctctctgtggtgctgtcttcttctggtggcgatccaagaagaacagggtcggtgctgtgggtggggttcctggcggctatggccgtgactctggcccgccctcgatgtccgattctcgcttcgatggcgactacatggctcagcgccgccaaagcaatggcagcatcgatgatgaccatgacttctctcgtcggatcttgcaggtacacacgtacaacgcctaaaagcattgtttcgaagctgacttgtgtcacaggtgacaaaccctgatcgttaaaccaatacccatttccgaaccattcatgctcccccccctttattctttctacttggtattagcgaaacccaatgtcatttctatctcggtcgcactactttatgagagcttcttatcctgttgtcattgtttttttgtcgggttattcagcggagttatgatatccgaacggcatatggcttgatccgagtcgtccccagctggtgacctgtgtctgagtttcttttaccaatccgttccatgactgctccatagacaacgttgccctacctgtccagcacctcttattgtctacattgggaaaacaaccgcaccatcggccttctctgccgaagacccggtcattgtatcttgttcaatcaaggtgaagtctctgatatagagacgagttcgaaaaggcgtttcattttatttcaacttgaatgctcgacttttttttttctttttatgagcaaaccattcctttatgtgactctttttttttacttttttttccccatgtggtctcttttcctatttccagtcagatctttgcccgtcggtcctataatgagcttctcgcgttctgcaattcgctccggtctgatctgattcaaggataggtggctgtagataggcgagaccattcagctgtacttaatgtgagaatcgatatgcacatcagtctacggtcatttgcttgtaaactagaactaaagtgatttcaattggtcgaagctgggtttgccgttagttcatatgtatgtcttggatatatctgagtgttttagtgtttattcaatcagtatatttgcattgatcatcttttaatgtctcaactggttcacttcctatgggcctagcgatcctagttcgtaaattgatataatcaggtcctaagtcaactatatattgtgacatcaccttcaacccggaaggtttatcgccttggattaagtcatgcgcctcactttagacttagattctaagaggcaatgaataatgagaactcattacaaagtacaagagaccgaggcagaactccaaatttattcagtatgggagctcaatatcaaatagatcccccaaaatgcatgtaccaccgcacatcgcaaaccatcatcgaaagcctcaacggaggcaacggctcacgaagatcacctgaagagaaaatgagaaaagatcgagacaaaaaactacacccttacttacagcagaggaatagccaaaggaaatgccgccatcatgtccttgtaccagcgagcgatgttgggatcgctgtggtcatacttctcccgaatcagcgcctcgatggtttgcttgagcgcgaggacttcgatgtaccaaggcagggcaaactgggtctcgagacggaggtactggcgagccgcatgctcgaattggacgagcttcggatgcggcgtgccatcgctccggagaccaagcgaagacggagcctggaaagacgcatgctggtgggtacaatattgagtgtatgccgccatatctgcctaaacccctcgaaatgtaagtggatattgtacgaaaagagcgatgaaacttacggcatctccaccatgccggcccgcgaggctgtgggccttgccgtgggatttgatcagacaatcgagagccgagcagaggtctcgaaccgcccctgcaacggcgttgacaatctcgatgtcgtgtactaagcccacatcctcgcctttgccaatcccggattcctcgttgatccagatctcctggacccattccagcaatgcctgaagttcgaacccgtggccccggatgccttcgtaaggctagaaagaagtattctagatgagtacatacacgactgaatgacaagagatcctcaaagaatacccacaagttcacacctatggcgggcatggcagcatctttggcaacgcttcgaggtgactggatcgcgaatgcagttcaccttgaagggttgaccccacttcgtctcgtcccaggcacgcagtgataccctgaagcagtggatacaccaccccgtctctgcgggaaaagggtattcgagaagttgcgggtcaaaacccagactcgctagtgtttcagcaggtgttttcggaagcatgatgaagaaatgtctttaatggagaaaaaatgacattgaagcaggatgcagaggtgaagaagagaagacaggaaagtgaaagaatgaaaagatcagtctcgaggtaaacaaaccttgaaaggtaaacaaagcaaacacattagatgagtctgatattcctttgatgttttcttggaaggagcaaacgagaaagaaacgctccttccttttccttccatcctaaatgaggttattcgatcaccgctcttgcctagaaatgtctgggcatagaacagtccagttcagtctgtttttggaccgaaccatacagctgagataagaggaaaccctctagctacccttcgctaatgcctacaaaccatctctcacttccccatgatatcaggaaagagatacacacagacctcaagccacataggctataactgccagctggctagccccaacaatagccaacaacctagtccataacacagcctcgcccccaacttactcgttgagatccatggtcccagtaggccaacgccggacccaacagcggctgacagccacatggcttcatgcgacgctaatctagcgacgaactagatatgcaggagagagaaaagagaccgaaggattccagtcatgctggtctcgttggtagactgtggcagctgataaatcgagcgtgttggcgagttagcctttgcccaacgaaggatggagtatttcccgttggggctgaaaattagccgctcaagatattggacgcagactaggctgaaaagagtaggacactaatcgaatgagctgtttttgatctagttgacatgcatcaaagcctgagattgccactactctttgccaacttccctcctcggtacagtcctccgtgcatggtcacatatttctgctcctacctcatgtcagatatttctacatatgcggaggtgccgtagattatacagactcgaacaggcgcggatcaatatgaaatataaatatacaccgtatactgcatcttaaaaaggtccactccatacaacatagagggcaatcatagcacgctagccattcctattctcagcccgcttcaatcggacaattatacagtcaccccaagactgcaggacaattagccaatcaaaattgcagcaaaaccaacagcgtcaccaagcatgactagcagatgcacgctggcgccctgaacaccgggtgcgcatgatgtcatgcaggtagtgtctatggctatgcaaagctagactcgagcgcatctagacagggtaatatgaccccgattggcttaaggcttgttgttggttgttagtagttccagaatagcaattcctccgcgaactataaaaagacggtgtattgttccctaattagctttgtgaggtggtatcctagcagccatgctagttgctagtctaggtacttgcatgttgggaagactaaaacggtatagtattgcgcttagtgtgatgctctctaagcaacctagttacccaagcaagccaaattaactacccagtgggagtactcacccgttgagtgatctgcaaaggcccacagcttttggccatgtggtatcgacggaagagagcgggaatcagccccgttcgcatatcggaaattgtgactctccgtgcggagtatagcgaaagaaccgtatagggaaatgagaaaaggggtaatcgggagaatcgagatggacaatatatattgtagatctatttgacccatactaagcactgtaatgtcggagtaactagataaatgcatctcaaggtctttttttcagggttagctcgttcaaacccctttgttgtgcaggtcggcgtttgctttcggcttagagttacattttctatctatctatctacaacatggcaattacaggtactactccataactgggagatgaaagtaccgacatattactagattacaaaagtacctggtagtattttgcgttaattcgctagcatagacggataatttaaccatcaccgagccgatatattatgtactctgtacggcgtgtgatagtgtagtcaactagctaatggttagttaatggttctaaacaagaatatatattatatcattgcttcgcttcgctccgcaacaaaatatgcgcacgagcactttctctaaccactgacatgtttgtccacggacacggtaacgggaacgcagatgaaacagacacagtcgcctattcctgttctagttaacagtccagtacaaattatctggaattagctagtggctatcatctcatgcacacgctgcagtagtgctgcagtagtgcctgcatggttacgtgccctaaattagctcgcatttcttttccttttccagccacatgggctacggctcggccgtacgggtactgagtacaaagtactatgcatttatatttgatttgctcgaatcaaaagagattgttttcttttttttaaaaggaagagtaaaaccaataatttattgaaataaactcatatcgctatacataatttcccgagagattccacctgcatgaagtatgtatggggatcataatggcagtgctatgccattatattatattaaataaccccaaaagaacgatcattaccagatataggcattggtggtcaggcactcgaaactcgaaatctgcctcgcaagcatggccacatggcatggtctgatcgacgggtctatctgaaacgggatcgaaatggcccaggacctgcaggggcatgccattagcgcaggcttgcaaaggtgtaaatgtcgaaaaagcaatgctatgccgaagctcctatgaaaggagaaaatgagtatttattctaattcttccgacttcggtaaaccgttgctccacttagagtccagactcgacgctcttcctttttttagtatgttagagaattgctacgatcggagcccttgtggggaaataccccagaaacaggaaatttacgtagattccttgatgacgatgtatagaatgtcagtaactatagcatcctggcaacactaggcgtggcagatctcgggacatgaataaggggattgtcgagcgtgcaggtgacgagtcatgttctcgtcatctcttcggttaatccctgaatgatccctgcaagtgtgctgtatgcggtatggctcgttttggtcaagacaggggaacccgcttggaagacaaattgcctcactaacgatcgccagtgacgatggagcaaaaaacattgatagatagcgacgatctgctggacaggactggaccgtgcagatcgatcacactttttctggcctacgaagtccatattgagacccgctgcattggcgataatcgcgatcattattgtggagctattgaccagcacctggcagagagaaaactcgattcaccaacgtgaacagcaacagaagatcgagatcatagggataatggcgatgctagtgggggtaatcgtatagccgagtggacctgacctaaccggattcacataatgcacatccgcgcttacaatcgaattctagcatttggtgccccttccacgtgggcgcagtcaatcaccagaccctagcaggtatcggaatctacggagtttgaaggggtaaccttgctacataactctaagaggaaagctcgggtatagccgatgtctcctatctctttcggccaatcccaagcgagggaggtccaggtagttcaaccgggacatcgggaatagccgtacaacatacggagtaattccgacggtaaacagtaacttcggctatttatcccggaacagggggacggaggacggagacggagtatagcaaatgtcctgcgctgattcgaacccgatgcacccgggttacagggccactttcttgcgagttattaagtcacaatataactacagagcgtttagggaccgccaagactcggagcggttcgatcaaacgaatcagaaataatagcacttctaccaatcagaaaaataccctagatctgaggtgagattcgtcttccatggaatactccatgatgcctatgatgtacataactgactagttagttagcacgtccctcttatatcattgtacaagccttatccgtaacattgccacttcgctccttcaatgcttaaccatcctgagaatcgtgcgatccaccattacgggaggttaaaaggggagcttcagattcaccgattaacatgctactctcggtcccggaagggccacctcttggccaaagtgagctgattgaaattaaagagcctcgaaagcttagggggccgagtggggacgcatacacgctgctatattccgagtccaaatcggtcatttctcatctcccttctgtccagatcgaagtcgtccaaatgaaatattaacttttcaagggacgtactctaacttgggtgcgcccatatcgattcaaaggctctcaacatgggcgcacgttgcggatacatactctaatttaatctaatacacttcgaattgtgccacagtgtgaattgctactccatacttcgtacccgcaaattagtttcgggtgctattttgtcgatcaggaacgaatgagggagggcgtaatacgtataactatgcactccatacacagttatcaagtggctgtgtttatatctctaccacaacggtagtataagaatacgaagtatgaaaaggtactccgtagactagcgtgcatggcctggcgtaggtcccgcgtggacggagtaagcatctaaaaaaagaaccaacatcaaaccgacctctctgactggctcgtttcacaaagtatagtcacatagtcaattgtatgttgcatgcctttcttcgtgttctgcatggcagccggtactattgtaagcaaggcttattcagagtaatcttcatgttcaagaaaaaaatggctattcatagattttagatacctagatcttccgaagactggcagctcatgcgaatactatcaatgcagcatcatcccacctgggcatacataccccatattatctaaatccctcaaatgtggctgttgacatcatctaaacgacaatggccgacgatcccaacagcgctacgaaagaataagcgctgttagatttttacatacaaaggtgagttggcgacaccatcctaagatttgaagcctccatgatctacacagacgctaacagccacgagccatgggaaattgcaagcacagcggaaaatagcgcgaaacagatcgcaagcatagaattaattccctcttaaaaagaccgattggtccataattgcacacttccatattaataccgggtccctctacaccaaaaacggcctagatcaagattatgcacaacaaggctgtgagcgcaactaagtaacgacgatcgctagggcccaaaaaaggaaaagaaaaaaagtccaattacacaaaaccccaggctaagcccgctttctggccctagccgcagcagccgaccaaacatggccaagacccactcttggctacagtgggagcatgttgtatagggcagggcacgaaggagaggcagggatgcatcatgcgtgtctaaacttggaacctgggaaaaattaaacgagaggctgtggtatagttcccgcatgctgcatatgtgcctcgttctggtttgggtccgtctatatccagttatggaactcgtttcaagatccctgtaaaactgccttgcgatcatgattctcatcgtggatcctggtaatccgtgatctgcaacaatgtacggtggatcgtgcgagaagaacttctatatttctctccacagttacctagtgcccgtgatctgtctgatcggtccgtataacataggtagatggtggtatatactagtgacgggcgtcagcacgggacgtattttagcctggaatgatccttcgaggattcctgcataatgtgcactcccgctcgttattttagtctattgttccttgtttttagggatgtgcttggcggaaaggatcttggaaatttagagaagcagggatagttagaggtagcgtgttttaatgtatattcagaattaaatttgctatagatagcgtattaagttcctgatgcttgccctgccacgagggtgacaggggacctattctccggtcctgcatgcggtggcgtgcagggtaacttagtcccggtgttgggtccccgggacaaagatggtgtgtatgaggattcatatccttatactccggatgtaaatcaatacgaccttgacaatatggtgggaagcaaatagttccccacgaaccctgacgttttgaaatcggagcccggagttctaaggtatccgtcccctcccccaagagtcaaggatcggcgcgctgaaacaaaagcgcaaaccttggaaacgaccaaatgccaagacccagccaaggtccccggggccctctttctttttcttttctttttttcttttgccctttcccttttgggtctagtggatccggtctagttcggttcaactgacctcaagtttggttgaggctttggtcgaatccatggatccaccgctcccgttctggttgaggtcatatctgacatttgaaaaagtacctcttcgctgtatatcgtggagcgacaaaagattaagagtatcaaagtcttattttctataattggactgtattcctaattcagaatatcccccgctagtccagtcgatatcgatccagccctgtcccgagcctcttacacccccttttcggaatagcgcgaattctgggtctgcgagttgcccgaatcagcgcacgccccactgatatttatgtcccttagcttggatggagcaaacccgttacattccgtggaagcttggactcgcagcctcgggtcctccacgttgacaggatttggaatatcagagccattttagcggctttcatacatgggatgatttgaaatcattgagcttattctagctattcatgaatggatacggagtactccgtattactttaatcctaaacgctaattcacggtacttccattgacggtagccaaattgcgcatctctagcacagccatattccaatttcttattatcaaagggcggttgcaaagcctcagccgcactcaggttcttatgcaatgctgtgtaaatttagtacgcttatgctctgatcatcccgcagagcgatcatcgcctccacgcccgtgctgtttccctggatctaatctcagttagccctagttgccttagttcgccttagttcgccttagttcttatgttggatttattttggttggaattattattagcttggatattgcgattaattgtttttattttattgtttttttattttggatattaatttccaattcgctcaaagtttattaatcctcgtagatcgtaggaacagtgtatatcagtccactctcttctcttcctcgtctcttctcttctttcaatattctctgcgtcttacatctcatccataccagcctcatatctatcctatcattcccctttcatacttacccactccacttacattctattctccaacacatcatggctcggaaatctacagggcgcatcagtccaaagcacatcgtctctgtcttgaactcgcctgccgtttcctcctcttcgccagaaccccgtcaactagcggcttccaacgtggtgcgccggaagaagaacattcgtccaaacttggcagatgcgactattcctgtaacctatacaccaaccacccatcgcatcagcaaggccaagaagggaaaacgtgtacatgcctgccaatacccagcatgcggaaaggtcagcacaatcatcttcacctatcaaacatcaaactgactccattgcaggtcttcaccagggcagagcaccgaagacgccatgagttgaaccacaaccccgaggcatcgtaccgctgcgcaacagaaggatgcaacaaggcatttcaccgcgctgatctgcttgtgcgccacatggagagacagtgagtaccttgggaattggctacatggcgcatactaacaaccatggcagtgaactcgaatcgaaatcagaaaagtcctcattggcacccaaccccatcaccgagtcccctgtctcgccctgtatgtcaatggaccacggaattccattggctgcaacctcccattcacactccatgtccatcggcgcactcgtggctcctggcatccatccggatcttgccaacaacgactgctcattactgtggagcggcatcgaattgcccctacagccccgcccggctttccacagccagctgcccgagtctgtcgacgacagcccgttctattcttcccccgcagagacctgcccctcgcctctgtcggatgcgactttttctcttcctccatactcgagctcctccatctcttccgctgggtctgtcatcgaccagtacccgagcaatatcgtgaagagcgagctcacttcgtccccgcttcagatgcacactccgctccgttggagtactgagggtggcatgcctccgtcggacctggtccccatgtctatgggggagaacatgatccagcctgttcagtgccactatccctctccttcgtggtccagcgcagactgccttccatacgatgaccaggtccattccatgcaccagttccagccggtgagctgggccatgtgaaaagatcgaagctatttggtcaaacattgactgtagatggctgaatatctgacgactacacgaccaccgcatttcccttcatacgaaaccggcacgatccagccccagaaaaccttgaactccatgacaaagacaacaggtgtgggtccaaggaacgggaggcccggtgtggtctcgactccctacaaatggctcaaccgtcattagcagggctctccactgactccattgttgcccggaatgtgaccgcctggaggatcgcctggacttcgggtccgtcggtcaccgccgcttacaccacgcggccacaaaataaaagcccaaagaagataagctaatttgccgatatcggctggttaattccttagtctggcgtccagagacaaactgggcattagactggaagttttttctcttctttgtttaacgttttccttatgtgagatttccgacgacatgatcatgattgcttgtttttcttttctcatttgtctacctaactactacaccattatacccctacaggccattcaatgtacctcgaaactcgttccaagctgatcttcatactcctacaaaagtaaagctcaaattcaacaaaataataaccccgatataaagttcaactctattaaacaaccacccatggttcggccggccgtcacaaaacccgtaaaacgcaagcgagataagcgatctccgatcggagcggaaatatcttccacagagtcgaagccgtcgggataaactccgcttatgtaagggcggaaccggaacaaagcgaccctcccccttccttccttcattcacctggggcaacgcaatgacaaggcaacctgagagactcggagcttccaaccactcaaattccttctcggccgtaagttggacagcgtacattatctccgggtagccttgggccctaccttacaacgaattgtagcttacccttcggacgaaaagacttggctacctccacctttagtcccgcaatacccgcaacacccagcctattctcaatgaggtatacggacctcttcgcgctagacttgttctgggttgaggggggaatatcgttatttggatgggcggggggtggccgcttatatttgtaatcttttttagttatcttgagagttagttaactagttagttaactatgtattgtgggtttttggatgagatctggatggtcttgaggtggggagttgagggttggttttcgactgatttataactacggagtacggaatacggaatacggagtacttatattgactatctaatgtattgattggccttgtatccattgtctcttgtcatgttgtatacattcttcatgtacttttctccccgatggagtgagtaagtgagtgagcgagtgcttcgtacggagtacactactctccgctccgtaggtactccggataacggagtagaggaactagagctctcgactcggctgtggggcatgttaggctggcgtgtcgatcaggggttctcgggggtgtcacgcggcttttcgaggccggggctttcgttcagacctgcctgcttgagtggtggtgtggatttgctatttgtttggattcttggattcggtgtgttgggcatgattgttgtggggtgtgaagtggtcttgtggtggattgctgtatgctgacgcagttgtacattgggaggggagtgatggctgcttatactgtagggacaaagattgcatcgggcttatagttgtgggccagaagcaatttttgactcgtgttgtagtcatctttatctgaaagtagacagaaggctgcatattcattggtgtagtcctatgaggacgttccaaggaacagaaacaaagagaaagtaaaaagcaggacttcttgatagctgattactttgaccatgtacgatacatagtatgcaaataaatttgatccatcattctcaacgattccctacaacatagggaacgccatcccatcgcctcgaggatcactgcccgcagcataaaccagcttcccatcatcatagtacgaacggatgatctggccgcgaccaaacatagcccgcttccaacctttcaaaacctcaatcttgtgaccaagacgacgcagtccctccacggcagcatcactaataccctcctcaacccagatcgtgcggtcagtactctcctcattcggtgcagcaatacagaagcgcggggaatcaagcgctgcctggggatgatacccgaaggcaagcatgttgagcataacctgcacatggccctgcggctgcataaagccacccatgacaccataaacggaatgtaaggagccatcggcgatattagtgataagggcagggatgatagtgtgatatggccgcttgcgcggagctaggacattagggtggccttcctgcagcgaaaaattggcaccacggttctgcagcgtgaagccacagccagcagggataatggccgttccgaacccggcatagttactgttgatgaaagagatgccgttgccttcgcggtccgtcactgcgaaatacaccgtgtcgcagtgattgtgtgctggactgccgtggtccaggatatccgctgcgtgctcgggtttgaatagcttcgcccgctctgcgaggtaagccggatcgagtaggccctgcgaaggtacgcgctccacgtctggatctgtgacccaccaggctgcgtcggcgaaggcgatgcgcagactctcaatcacggcgtgtaggtattcggctgagttatgctgggcctcggtgaacttggggatcttgcctgctttctcgagttcctccatgatgcccagtgccattagcgccacaatgccctggccatttggtgggtgctcccagatctcaacacccttgttggcttcgccatctgtgccggatgttgattttgagacgatatcctggccggtgaacttgagtgaaatcgcatcgacttcctgcgacccgacttcggcgtgataggctagatcctcgagtgacatgtagccgcccagatcttgcaccacctttacgatggcttccgcgatccggccctggtagaatcctttcttaccatctgcagcgagcgcacggaaggtcttggccagagtgggattcttcatgatctcgccgggaagcggggctcgcacgccatctttggctgaaggatcgactttcaacatctcacggaagtttggagatgcattgcggatttccttctcagaaacattccactgcgcggggttagttgatggtgcgattgcgatggaatttaatacttacgccctttgacgaaagctccgacaccgggaacccctcctctcccagctcaatagcaggctgtagaatctgctcgagcgataacttaccactaccaaacttctcaactgtatccacccatcccgcagccgctccaggcgtggtcacagatagagcattcaacatgggcatgttgcccggctcaccaggggccagaccgaggtccttgcggactttctccaagctggcattaccaggataccgaccagagccattgagcgcatgtaccttcttcgtcttggcattgtagaagagacagaacatgtcacctccgataccggtagagccaggctcagtcatgttaagtccggcggctgttgaagcatgagatcagttcattgtttcctgttgtgattctgcaactcgaggcgaggcttacccacggcaacagcagcatcctgggcaagagaataagtcagtattgttgaagttgaatatgacacgtagaatggaacgatgtacataccgctgcatttccgccctggctcaggatcttatggcctgcagccgcggctagtggttgagtgcatgatacgatgcccttggtgctgtggacggtactccgtcgactgggaaatgggacatagtccgcattggagcgcgaatatacggcttttgcgttgagcggcatgacttggatgatgaccccagggagaagtgggagagcgggggatatgaggggatatcagacgcttatcaaccccactaatttccccgggctgtcgcgaatgataagaacagtgaggttttgcgaattggggaaagttgttgactccaaattggactttataattactaaataactactctgtaacgtaactacctagttaactacttcgtacctaagtacggagtaaataacactcactatatatatagggtactcttacccgattaggaaaggccttagcttatgtacatatacctggtagttcggccgaggttagctagcaagggtatacacatatcgttccatcgttctatcattgttctttccacatactttgtatcatcagagacctcaattctgaaacaaaaacagacatgatcacgtaactcaccgccccgacttcggagcggcaattaatccttcgttccgccatcatcccgccattgaatttcctatgacgcttgtcttgtctgatgaaactgatcttgagaaaggcctctgatggagcagcatggtggtatttgtcgacctcgatgattcattcgctgacggatcggcattcttggagaagccataccctttgattgctgaccccaacacggagtcagccgaactacccacgtcgcatacttccccgaataaaaagaccgatgagatcttaaaccccaatcggaatggattctccgcggctttgagttgttatccgtatgtctttgtttgtcaacagccagcaaataataagaaacagaccccactaacagttcgccccatagcattgtcaaggaaatcgctcgcgctatcgacttgaataccctctacgccctctcgaatacatgtcgtcagttccatctgaacttggcaccgtttcgccagcaattagcgagagagaccctccggtgcgacaatgaatacatcgaaaccctagcagagatgctagacagcggcgctgtcctcccagacagtgtcaaatcagtcatacgactactgagccgtcccggcggcgagcatatccgcatgacccgcgggaaggtgggcaaatgcgcgcgcgacatggtgggcgaatgtcgacgctgcgccaaggttgtatgcagagtaagccaaatccgcccccccgcctaacaaataccagtcgctaaacccagctggcagaattgcacaatcaaacccccttcccagccagcccttaaaaaccgtatccgccgcctctgccgaacctgcggcacagcgccgctctccgcccacctctcccacacaagctcggacccgcacacccccgacccgtttgatgagaacagcgtcgcggctattgcgttcgcgcgcaacccttgtaattgtgaggaagctgtctggctgtgcacgcagtgcggaatgacattgcgcactaatgacacgacataccgtcgtgtctgggcgtggcgcacgcgctacagcacgtacctcggcggcgggttgggtactgacattggtgaaggctgccaaggggtcaagtgcgggcgtggtgagaactgtcttgctgcgcaggagattgagcttgaggtcgactgcgaggctgatgaagggtctgggtctgggagtgacactagcagtactgtacagagtcctgctcctccgtcgtttggttatgaaggaattggtatctcgatggacagccatgacgatgaggagcccggatattgcaggcaggaaatcattgggttgggtggtgttgttaagcataagtctaagaagagagtcaatgttggtgcatgtgttgttgagtatgaggacgagagggagacagggaattatcttgagagggaggagaagggtttgtatcgtggttggtgtgggtggtgttctagagtaattccggcgaagaacgagcagacttgattgattttgctacttatgactgtctgctttagggctttgcatgttgcatgctgcatttgatgcttcggcgacttttttattacgactgatgctggtgaagctttgcattaaatgacatatatcatgacccatgatacggggtcgcttggacagatgctacgatgacctcaagatagctatgcgagatgtgtaaatgacgatatcacaaatcaaaaaccttgtcaagttgatgcatattcaattaaatcttgctaataagaaacaattcaagtactcctgcaatgattcgccccccaatgcaagcacaaatccatcaagcatacaatgtcatcaagcatacaatgtcacatgcagatcgtttcgttaaagtaaaagacaaggttggaagtgaaaaggtgcaaaaaatccgtatggtctcaatgggcagcaatcgttctccagatagtcttgagcctcgactcctctcgaggaggtgattcctcgcgcctgtggcgacgatgagagcgttcctctcttgactccctggaacgccgggaggcgccctcaggcctcttctcccgctccctctccgtatcaccttcaatttcccgttcacgtgcgtgctcatgcgcacgctcatgcttctctcgatctctctccctctctcgctctttctccttctctcttcctttcctctcttccctagatcgaccgtgctctcggccgtgctctcgaccgtgttcagtcgagtgtcgcactctcctgctctcagtgcgctcaacacgctcactgcgaggatgctcctcttcgcgtcgtgaccgtgatccactagaccgaccagcagactgaccctcctcatactccgcccgatcgtgacggctgccactgctatgacttggcgatgatcggcgcggattttcaatcggcggtgcagccttggtggcatttaggcgcagcaaaggcccattggtatccgacttgccttccgtcatgtatcgcaggaaggcacggggcttgggcgtcggtagcgatgttgatacctgcttcggtgaagaagtcctggctgagcgggctcgttcgagagggctcgagggagtatcggaggtgcggcgtttggatctgtgctcgatgacttcggcctccatttctggttccattgctctctcctgctccttcgccttctccttggacgagctcttcgagcgtttcagtttgtcaggggcggggatgccgctgcgctctcgttcctcggcaagagcgcgctgctttcgttgcaactgggatttctcatcatgttggcgtcgtgcttcttccagcgctttggcccagcggttggtgaagatgcctcgttcgctcttctggcgctggagttgatcccggtggccgtcggatgatgtcttagaatgccgacgctctccctcgatcggtgaactgcgctttctgcggcgtcggctgtggcgggctgctgcggcttctgcgctttcgtcgagaggctcggcatcgatcatctccacctcaggctgggagtctcctgggggtggtacgagctcgtcgggcgccacttcgtcgctatcgggaacagtgactggctcccgggtagcttctggttctgctggtgggtcttcagcggggaggtctctggcagcctctggctcagggattggctcctctagcggtgtctcaggcattgcctcttccggcgttggagtctcggctgggactgcagctgcggcctctggtgtctcagctggggcctcgtccggaacaactgtttcagccaagggttcctcaggtgctgggatctcagctggggcagcttcgacaggagctggctcttcgggggttggctcatcagcaggtgcttcctctggaatctcctttggtacctcatcgggtacgacttccggttctgctacgggttctgtaggtgtctcggtagcgggcgcttcttccactggtgtctcttccactggggcgggagcaggtgcctcctcaactgctggttctgggacaggagtctcctctacagcagcggggacatcttcggtcacttctttcacttcagcggcaggctcttcagcagctgcaggttcaggctcagcgggagtttcagcagcaggctcagtgggctcagcaggggcttcaacaacaggctcaggctcaggttcagcagcaggttcaggctcagcagcaggctcaggctcaacaggctcgggagtgggctcaacaggagcttcaacaacaggctcaggttcaggttcagcagcgggctcgggagtaggctcagcagcaggttcaggctcagcagcaggttcaggctcagcagcaggttcaggctcagcagcaggttcaggctcagcagcaggttcaggctcagcagcaggttcaggctcagcagcaggttcaggctcagcagcgggctcgggaataggctcagcagcaggctcaggctcaacaggctcgggagtgggctcaacaggagcttcaacaacaggctcgggagtaggttcagcagcaggctcaggttcggcaggagcttcaggctcagcagcaggctcgggagtgggctcgggagcgggctcaacaggagcttcaacaacaggctcgggggtaggttcagcagcagtttcgagttcagcagcgggttcgggagtaggatcggcaggagtgctttcttcgactggtgcctctttgggagtttcctcgactgtttcgggctctacagcttccaccttgccctccgcagcagcttcaggttcggcagcaggtgttccctcaactggtggttccttgacaggttcttccggagcctcttcctcttctgctgctggtgcctccgttgtttcaggtgatggttcagcctccggcgttgactctaccgctagctctggctcggcggctgattctggttcaggcgttagctctgccgctggttcgacagctggttcgggttccggcgttggctctggatcagctgccttagcggccttccccttcttgcccttctttttcttactcttacccgctgccttttcctctgcaggtggctcctccgagggtggctcctctatgggtggctcggctgctgctggctcttctggagctggggcatcaggaggattatctacgggctttnnnnnnnnnnnnnnnnnnnncgctggctctgccgctggctctggctcggcggctggttcgggttccggcgttggctctggatcagctgccttagcacccttgcctttcttgcccttctttttcttgcccttacccgctgatttctcctctagctttggctcatctacggatggctcgtctgccgttggctctgctggggctgggacatcagggggattatctgcaggcttttcgggctcggcgtctggctcctctgtgggtggctcggctgctgctggctcttctggagcaggggcatcaggagaattatctgtgggcttgtcgggttcagcttcaggccccggcgctttttcggcggctggttcgggcgctggctctggatctgccactggctccggctccggctccggctctggctctggcgctggctctggcgctggcgctgggtcggccgctggttcgggttcgggcgttggctctggatcagctgccttagcggccttccccttcttgcccttctttttcttactcttacccgttgccttttcctctgcaggtggctnnnnnnnnnnnnnnnnnnnnnnnnnnnnnnnnnnnnnnnnnnnnnnnnnnnnnnnnnnnnnnnnnnnnnnnnnnnnnnnnnnnnnnnnnnnnnnnnnnnnnnnnnnnnnnnnnnnnnnnnnnnnnnnnnnnnnnnnnnnnnnnnnnnnnnnnnnnnnnnnnnnnnnnnnnnnnnnnnnnnnnnnnnnnnnnnnnnnnnnnnnnnnnnnnnnnnnnnnttgcatcggctgatggttgatcttccgttttagcctctgggtttgactctgctggagtttcggcagcctctgcaggtgtttcatcggcctttggtgcatcttccccattctctagagcgtcttcggcggccgctttagcatcagcctctttctcggctgctactgtctcaggatctacatcaagatcaagatctgggaaagcttcgtctacatactgtcagctttgtaaggactaaggtaaatttgaacactgaccatcgttgccgttatcgcctgcttttttcgtgtcgtcgcctgctggagcatcttctccaccttcgagttttgcatctccttcggattttgcgttctcttcagacttcgcactatcgccaggcgctgcatcgtctccgggttttgagtcgccttcagactttgggtcttcttcagactttgggtcttcttcagactttggatcttcttcagactttggatcttcttcagactttgggtcttcttcagactttggatcttcttcagactttggatcttcttcagactttggatcttcttcagactttggatcttcttcagactttggatcttcttcagactttgggtcttcttcagactttggatcttcttcagactttggatcttcttcaggctttgcttcctcttcagtttttgtatcgccttcgggtgctgcaccatcagcaggtttagcatcctctgcgggtgtcgcatcttctacggcagcctccttagaagcctcgtcgggatttcctgcatccggtgctggctcatccttgccctcttctttagattctgaggcaggttcgtcgggttgagactcggctggtgcggcctctactgaatctgagaaaattgcgagttaatatcaagtacaaaaggtagaaaatgaacctcatctatagaaacctgaggctgtacttacctgtgggctcagcggctgcgctatcatctccacttggctcagcggagggatcttcagaggcagggtccttctccggttcggcggtttcgggctccttgttgtcctggttttggccctcggtcagatcggtcgttgaataggtgacagggtaaaaatggaaagaattagtctcatagtcaaaggtcgtatattgacgttcaaccgatgcatatgagaactcagggatctcggcatacttgaaagccatcttcaacagcggctgctgccgggtccagggcagagtctttattctcgagttcagggggtggcgcggaaccggcgggagaacgattgttattattcttattgttcttcgtcttcttcttcttgggtgccattatacccggtcaatgacgtatcatatatcgaggcctaggcgaggctgactggcgcgtgatgtgacgagaaccgggacaataggaaattgacaagtcggcttgtcgggctcgacacacggaaaggaatggggcagcaagggaaatcgaggaacaaaaggtacaaaggatggacaattgagagagtgaaactgggtagggtacctcatgtattagagtactaaaatggaaaagaaggatatgcttgtttctctggtgacacagaggtcgcattggatagtcatggtgaggcgacgtatagtagttcgtctcatatgcggtcggatgggacgacaacaaagtgcattacggtcttgggccctgaacgtcaccaatgaactggccgatagagccaattgtcattgggccacgttggtcgtcgggtctccatttccaggagtgaggtccggtgcttgattagggccgggtgagagcagtacgctccccacccgcggaaatacctgcagcaccaaggagtaaatggtgagatgggattggaaatcgcggggcagatcggtcaaaataggaaaaacagtactgcaggatcgagaaaacgggtctgttgaagtggggtggacgccatggaatgaattggtttgaaatgaatttgaattgttttggtttcgtttgcttttgggcctggatactacacactgagatgagaaatatgaattgggccgagggaacttggccgctgtacacaaagccacgaaggcaatgtttcaataggaaaaccgatgggcgacgcagaggtgatgcaggccaggcccatttctgcccaacgtgttccggtagacgcggcaaatacgatgcaggcgtagtacaccgcgggtggggagaccagggcaattaaccttcaaaaggatccggtattaggggcaaatattgggacttctagtacatgttttgcatgactggtagattcgaatcggagatgcgaaacggggtggttggggcgattgagattgtacggggctaataatggagtcgtggatactctcgtggatagttgaatctccactctcgacaccgacacttcagagtattgtccgagctcttttccggggacatcattctgtaccactcgactgtaagggagtcagcagttgaaatggcgatgtaatatgcagttaaacatcgtggactgcatcaacaaatctttgaagtggaagagagaaaagtggcggaacacgagtttctcgggatcaggtgatattgcgcattggacttggacgtcagattctatgtctctactgtatttccattccacctatgactacagagtacagagtaagagtacagagtatgcagatgcagtccagccgatcattactatcctcgcgtcaataccagccactcctgaaccaacccgtccgccaatcccttccaaggtttttaactttgtctgactaacaatctacaacaagttaactaaccaactaactgcctcactagttacctggtcgacagatcgtcttactttgtacggagtacaacggcttttcaccggggtcctcttctttcaaaatgacatatgtgttcaattcgaccgaaggtactcggtactccgtacctaagagataggtacaaaagccaacaactatcgagtctaaaaagagctgcatgcatgaccagggcacttttgtcttttctagcggattatcctttttgtgcaattaccgatagttatgctgtacttcctaactaatacaagtccttagtcacatcgccagatacggtcacctatgtacccaatgcagcgggccgagcatccatgccgtgttgcgtgtggttagcaaatagcagtctaggtgaacccctcgcatttgtaaatatgattcacatctgattatgatgtcgtttgtttctattcccagaattgggccatgatttttgtgttctgggctcctgggctcttcgactctgtagataggcataaacatcactttctttgccaagctttcctttgccacccaggcacttgaaaggaacatgccgatcggagagggctcgaggttaatagactcttattcgatatctgatattctatatttgatatttgatatcgcatatttgagagacaggctgtttgaagtatagcttagtaaggatgttgccggcatcgaatcttctagagaatgaccggtgtgactaccggcatcatcggatgaattgcttgatcggcaataatggcccatgggaaagcaaccgccaatatcgcttacggagtagaaaagctctgactccacagcgtgactccagcacataatcccctcaactcctctatcccaccggcgatctttgctctccctcacgatagatacatcgaatgttcgctagaagtgctggctagtcaataccatggcgtaatgaagctctgattggttgccttgctttttttcacggtgaattgatacgtgcagtattacggagtagagattgaagtacaacatgtaggtaatagcaacgtcgccagctttatcgtacgcaatcaattgcccctagtgattcaaggactcgagaatgcctggtcgaaaaggtaatggggttgaagtattcacacgcgatgaaaactctgcttaaacacatctcaatacacttcccccattgcttctgactcattcttggcttccatatgtcagcctcaagtcttatccaataggctccaactcttgtcagatacgcctcggcttatttccgatatgaataaccctacaactctggtgcaaggcgacgaatgtagctaagaatatcgcgattttgctttcatatactagtttagaaccaatcctctccttctgtaagttctgctcaaagtccacttccttcaccctgctgtcggattgcctttaggcaatataatcatttctcctcgtctcgaactgtttgccgcagattggctaaattggtttccacgctgttgactacgtcgtccgatgattccgggttccccttcgaaccatcggaatcgagcattgggcgttttgctattcccgcttcgggggtagtatcgcttttgcgcttttgcgctttcggtgggttatcgctcgtttcgggatcccctcagtaggctttgtaagcacgtaccggttctccctaagcagcttgcgcagtattcctggcctgaaaccaaaatatgtgcagtgaacttgccattgtattgctggcagtacacacaagattcctctagggtgttatatgccagatctgtccagaggaaaagagtgcaatttcatccaaactcgaagtacaagagaggacaagaaagagaaactatctgtgtgtcccgccctcccgttttatacgtgtccttcttgtaaactgtgcaaaattcaaatggtggctcttcaagcttatttggatgtagcttgggagagagcgaaagtgcaaatatagcaagtacgttcttcggcaaatgcgttccttttggatcgtcacacaactcacttgcagcttgattgcccagtaattcttctccgctgtcattagcagacagctgaggaatataatgggttctgtcatttctggttgtagtggacggcttaagtccttatatatgtaggactccttggcattatgctccgtcaagcttctagagcagacaacaatatcatccagatatgttggtggcgtttgtctttggtttattgccagcccggtaccttgtcgtctccgaaggctctatatattgggtcgggatatgcggtcccttttcttggctcgtcgggggagaggccgtttcttctaggccatattggagtgactaaaggccttctcgatgagacccagtgtggttactatattcaattagctatatatcccttctactctatgtcttgggttgcgtaccttgcccaagaacttcctcactggggttttgagcttgaagaagagcttataatgctctttagccataatctctgtggcaatgatactttcgctggccgcaccctccgcacccttgctaacaaattgcccgcttcaaattggtacgggctaccaggctgtcggtacgcgagtcaccacattggcacctgtctacctccaacacttccacggcgggtagtggaataactccgcagagatttagcgtcacaacccaatcaatcttttttcggcaatagcaacgagaaagctgtgttagactcggtcgaagttacaaagtctatctgagttacggaattccacgcagttttcgaggtcctttggcacggacagcccgcagtggccaagtgttggacaccgtccgaatttcaaaggtttggattgaccgctcgaagtctgctattggaagttgatatagtggtaaacttataggtattggaagagacgataacctacgaacatctccaggagaagcgccctgaggggtattctttcctccctttgagctgtgtagacggtgtgatccgctgttcgtccttgttcccatatggctacatattagtcctcaccaaagtgaagggagagccgttggagaagagatgggccgatgcatctaccgaatggaaagagttcatctaccggcaggttctgactgctatcagtgcccttcgagatgtgggagttctctgggcggaccctggcccccacgatgtgctttaccacgaggatgacaataagccttctgtgtctgtgatagactttgaacgcttcgagccacttcatcccgggcaactgccccatgccaacccgagatggcggctatctttggcctggaggcctatctcctgagaaattcgtgacgatacccaggaggctagaaagtcgcatgtagatacctagtcgatgtggttcaaggcctgcaccttgctatgagatgataattgaatatccccctgagttttttctcatgatttattgatatatttttctttctgtcaagggcgccggtcattatcatcctttcagttattataacacccaaaagaagatgggaatactcaaagggaactcccaagagtgtttttataaagtccctagatattctcgagccaaaccgtgcatacgataaaaacgatcatgaacgccggagatagaatgcacgagaacgtctacagacacactcttttacttgcgactacggcaggtttttaggtccatcgcgccaaccgggttttcgccgcaaggtatatatgtagtctcttaaaggtctagaaatagctcgtaccaagggtcccctacttacaatatttaggaatagttagcggttatattctaaaagacactaggaaagaccccaaaaaggtgcgatagaaagatgataacaaagtggtcttctctacgggatgtacgagcgatttagatactataggtattttagagtagggcatatatcgtgtataccatgaaaatgagcctgaacgccggagataaaatgcaacctaagtaggagacaacaaaaacaactcatttccgcatgtgttcatccaaagtctttctccacttagggccgttgattctcatcaggaagatgacagagctgcttgcgaaaccgacgaggccgaggatggtgaagatccagccattgccgatagcaccgatgatcggggccgtgacgacagaaccaacgcaggagaagatgtttcgcatgaagttgttgagggctacaccttccgaggattttttcggcatgaattcggtgagcatggtggttaccatgctgaaaatgagcatggaacccataccaaagaagaagttggcaatcatctatcagatagttagcgagtgctactgaggtatcgttgagattaaataagagttgacataccgggacaagccagaagactcccctctccgcggcccaaccataccagatcagggctgccgggtacatgaaggcgccaagccatgcgttctcacgcattcggtcttccggtcgtagtactagtctacctttctcgtcgtatcggtttgccttcctcgcctcccggtgcatgatgctgtccatccatttgcctccaaatatactgctcaccatgtagcccagcgagtttggaatgtatagcaaaccaacgatgatggtagagaagttgtatggctcctctttgaaggtatgctcaacgctgatattgagcacatagagggaaccgaaggcgatgctagcatagtacacactgagcaggacggggaggaatcggaggtagagaatgattttgagcgggtcaatgaagaccatcttcaaagtcttgagataccttgcggttgcccgaacaatctgttgcgacgagactcgactcagcgggcggtcgatatgtagatcttcctcttcaagttcagccagcacaggcttgtgcacggccaacgtctcgggaagggcgaacaagataaagatgagagtgatagcaccaaatgctgaaaggaaccataacgtgctccgccatccccaacgctgggctaggagaccgccgatgatgggtgcaaacaagggtccacacaatggacccaaatagaagatacccatggcccgtcctcgctccctgggttcccagagatctgcgatggtgccagcaccaaccgcctggacagaagcagaggcaccaccactcaacattcgcattaccacaagcatcgcgatagaatccgagatggcgcagaggcaattaaagaccacaaagagagcaaaagaagccaggtagacggtccgtcgcccaagtcgctcgctaaatgatgaccaccacaatgggaatatcgacatggccagcatatacaacgcgatcgacagattagtgatagtggttgtcgtattcaagtcatcggttacttgtgatagtgaagctgatagaatattagagatgatcagatagatacataatttgggattaaagactcacggaggaatatcgcgctacccattggtgctgtggctccagcaagagcgacgacaaatgtgatgaaccatttcattcggcgagggtatgtcttcggattctcaacctctgccaccaatgctaactggccaaacaagcctctgcgcttggatcgggcgacctcgatgggaggaccaagctccgtcaattgacgttctaggcgtggaggattctccaggtcgtcattttcttcctcggcggtattgctggagacacccgaaagggagtgaatgtcattatcaacctcggactttttgtccgctatgattgtcggatgttctccactgtccggggatgcgacgataccgtctggctcagattgcttgttcatattggatgtatgtgaagggaaagaaaggcgactcgtgccaattgaacataaaataaacctgaatcaaaaaaataaggcgcataaagctttataaaagtaaagtcaagtggagtttaacaaaaaacagccctgtgggagccctgcagatagccacttgggcaccgtaaaagcgtcgatctattcccctgatatataagatcagcaggtatgtgtaggcgcaaccttgagtaaattggatgttgttccaggaaaaagtgagagagagaaaaattccgaatgcatttggagagttggagatttgtgaccgacaagcaccgacagcgaccgagagtcataatattatctcttgcactcaagcgcagggtcacagtgcttgattattcgacatcacgctagtccacatgctatcccataaagatacaagccggcttatagagccagtcatcgttgagcgcgaatgtgccggttttccgtcggcaaatcctgaaggtgtctctccgagatagattggagacttgaagcggtctagatggacgtaaactagaatctgggagagaacagatgcaacattctgattgcatcataaagtatttaacagtcgcaatggacttaccttggctttcgcttggtatccctatattgtacttccccggatattaccttgagctgcccaggtgtgtcaataaataccccagagtcatattcttatcgtcatctaccccaccatatacaaggtatattgtagggcagatccaggtgtacttgctatgattatacaaatctgtcgttagaacagagcgtataccaaaaacaacctagaaacatctttgtacgccgcatcgcctatcttcaggtggagggctgctgcaaggaggtgattaataagcttggtgatactggcgatggatcccggaggtcaacatggcataaagacggtgaactccaccacgtccctcttgacaagaattaatcacctgaaaccacagcaaagcccaaatccaacatgaccagcccaacacaaaccaaaatcaacccaaacgaggtacaggcccacctctcccagtacaagggcgataaatacgtcgacggctgggcttccctgtgggacaagggcggcaatctgccatgggaccgaggattccctaatcccgccctggaagacacgctcgtcaatcagcgcccgacaattggcgcgcctatcgccaccgatgcacagggccagtcgtacaggcgcaaggctctcgttcctggctgcgggagaggtgtggatgtcctcttgctggcaagcttcggcttcgatgcttatggcctcgagtatagcgcggctgcgattgatgcgtgcaagaaggaggagaaagataatgccagttggtatcgtgtccgggatcagactattggcacgggaaaggttacttgggttcaaggtgactttttcgatgatgcttggttgcaggagattggtgtcccgttgaatggatttgatattatttatgattacacggtatggattcctcctttcccttgtgtgtctgtctacgttgtgatattcatcgcaaagcgggaatacatccacgtgatttgataccaataattttgtgactatttttgtccatatctcatgttcctatgttcactgttctcaggctaaccattatgcagttcttctgtgccctcgagccgtcaatgcgacccaaatgggcgctccggcacacccagcttctggccccttcgccagcgggtaacttgatctgcctggagttcccccgtcacaaggatccgcaggccccagggcccccatatgcctctccatcggaagcgtatatggcacacctgagccaccccggcgaaaaagttccctacgacgcaaagggtgtcgtcaagcacgaacctctacgggcaccgagcaaagacggcctggaaagagtggcgtattggaagccagagcgcacgcacgaggtaggccagggcgagaacggggtgatccacgaccgaatctcaatctggcgccgtcgtaactagatctgccgaaaggccgaaaggcacctagcaaaaaccgaagacaaaaatagatctgcaattgcacagtcgggtccattgaaaaggccactgaaaaggccaagacagaaatgagatagcattggtctgagtggcttaggacttcttcacaagggcattgtagtgttcgccgagtccgtaggtgtggcggtagtaagcgagccagataacgcgcttgcgcttctcctcctcgtcgaagctgtcgctgtcaccagactcgatcttttccattcgtccatccttctgcacaacatttatttccacaccgtatgctcgggcaatcgcctgtagctccaactgccctccccactcagcggtcaatttaatctttcgagtgtatgactctaggggctcttccatgaacgcctcgaagtcctctttatgttccataatgaaatctgccgtgacagctcgaacagcccggtagccatcgtgttgcggagaggcgactgtgtcgatccgtgactgtgtcgcgggctggaggacgattcggcttgggtccggccgcaagccgagtccggactcgtcgagttgtttggcaactgctgagtagagacagtgcccatccggagtcacttctacttccttcagacccagctttttgaacacagcatccatgacctcctgttcattgcctctgtagttcgtttgcgtcgcggcttcttctgctgcggcggctgactgggcggcttgctcagctgcacgccgcgcgagacgagctttttggcgatttggctttttggaattgggtgtagaagaaggttctggggtaggttcggctgctggttctgctacttgcggctcctcggtggggttgtcttgtttcaagtctccgtcatctgccgcttgatcatcttccagactgaggtctgcgaggtcttcggcgggatctccatttaattgtgcgatctcggcttgttgtttctcggacagatcgcgctgcattcgctcgcattcatcgttgattcctttccgagttttcttggtggcggactttttcttttgcgtgacccgtccttggagatctttttgctctttgcggtgttttgacaaaaggtcttccattgtggaataacgaaacgagaacaaacttcaacaattctattataacgggggtatatgctatgaatgaagacaaccaaaacacctcgaaccccgcggaaccctgacgatgcagccctaagttaaaccccaaagaggactagtgtctgctccacggcataaggatattccaggtccgtgtgccatcgtgtacctcggttgattcatcaagtagtctggcctcggtagtctggggtagggggtaggtgggacagatgtaacaaatatagacttctctctttgatattcttagtgtattaagtctaaatcacaattacacaatggattccgcaagtcttttcaacgtcaaggtcagatcacacgtattctacctctccgaccattctaacgcgctcacagggcaaagtggtgctggtcaccggaggagccaaaggcatcggtcgcatgatctcagagggctatgtaacaaacggtgccaccgtctacatctcgtcgcgtgatgccaaggcatgtgagcaagcagccaaggagctcaatgccctgggcaagggcaaagcctacgcgattccggccaatttctataaactcgaggaagtgaagaggctggccgaggagctaggcaagcgcgaaagcagtaagacaccacatccaatggagaatcatatcatttctgacaagatgtctctttcctagagctacacattctcgtgaacaactccggctcgaactggggcgccccctacgacgaatacccatccgaggccttcacgcgagtcctcaccctcaacctccaccgcgtcttcgatctgacccagctcgtcacacccctcctggagaaagcggctacaccggaggatccttctcgcattatcaatatcggtagcatcgatggactccgtgttccctcgctcgagacattcgcatacacttccagcaaggccggtctgcaccacttgagccgggtgcttgccaaccacctgggcaggcgaaatatcacgtaagtatacattatatgcttcacctctcttcgtttgatgtatcgagaactgattcaatttgcagctctaataccttggcctgtggtccttttgaaagtaagatgatggctgctaccttgaagacattcggtgactctatcaaggctagcgtgcctctgggtcggattggaaccccacaggacgtggccggggcttgcttgttcttgagtagccgtgccggtgcgtttgtgaacggcgcgactatcacactcgacggtgggagtgccgtctctgccaggttgtaagcaatggaggatatctgtaaatagctgtgttagcataagcattattggtgttcctagttagagaggactgaattcgggagagaatccctgacattccaatcaatggctggttaccatattcgtccaagggacaatcttgttatgagtcactaccccagagatttgcaaaattcatattcgcctttttatacatcgcacctcaagagtctcgccttcaaattgttatctcaaggcttatcaggcctggagcggcgacataagtggagcggcgacatcatcaatgggaatgcgtcattgcctttccacctctgccaggcccaaaacatatctttctatcaagttccccatcagtaccatctcgcatctattctcaagcttcatcaacacattacttgcatctgaaatcgtcttaatcgccgaacaaggatcccccgccttttctgactgatcgcaagtatcatcgaagtacaggatacaatttccagcatcatatatcagacccgttggagcacctgttcttgctgctttaagtttctcgactgggaatagtcggtgtggccgctttcgtaacgcacatttgaatttcaaattgtgccctctcttcttcttccgccacacagaccatgagctcgtcagatgggcatactcggtccggttctagctccactgatccctattccaatccagatgtctactatggcaaggaggataatatcaacaagttcaaggcgcgaagacgtgcattctcggtggtaagcagccacccctgaacagtaccccgcggtacaaggtacatcaagcttatctttgactgggatctacagggtctgaatgactacagccgcgaagacatcaataacttctttggaaccttgccctctcgacgcggtagccacggtatgcttgttataaatatgtcggatatgcggtcggtgcgaaagctgacagcaggacagatgaggcatcgggacaacctcggaagttccttatcgaggtggacgagacgcttgcggctcttttgaagcaggaagatacagaccaaaatatgcagatcaccatcgaggatttgggacccaaggtacgctggatggtgtcaaacacaaaaggaccactactaatcgatgtaggtgatctcggtcggaacagcagcgtcatctggacataagcgagtcgacgtgcggggcacatacatgctctccaacctcctccaggagcttacaattgccaaagactacggtcgcaagcacattatccttgatgaagcacggctgagcgaaaatccagtggcgcggctatctcgtctaatcaagaactctttttggaatgccctcacgagacgcatcgatggctccaacatcgaagtggcgggtcgagaccccaaggattggactgcggacccgcgacctcggatctatgtcccgccgggtgctccaatgcagttcgaatactacgagcggattgcgaaagaacgccccgagctacgccttgatgtgcagatgctgccggctgtaatcacgcccgagtatgtgataggactcaacgacaagcccggcctccttgcattggctatgcagaagaagctcaacgaatcgaccggggagactgatctggtcggtgtgccgttcgtagtgccaggcggccggttcaacgagctgtacggttgggatagctacatggaatccctgggactgctcgtcagcgaccgcgtcgacctcgctaagggcatggtagtcaatttctgcttcgagatcaagcactacggcaagatcctgaacgcaaatcgatcttactacctcactcgctcgcaaccgcccttcctgaccgacatggcactgcgcgtctacgagagaatcaaaaacgagcccgattcaaaggagttcctgcgcaatgctgttctcgctgccatcaaggagtacaacagcgtctgggtgacctcccctcgcctcgatccagagtctggtctgtcgagatatcgccctgaaggttggggcgtgcccccagagaccgagcccactcacttcgtgcacattctcactccgtacgcacagaagcacgggatgaccttcgatgaattcgtcaaggcatacaacgctaggactatagtggagcccaaactcgacgagtacttcatgcacgaccgagccgtccgcgaatccggccacgacaccagctaccgctttgagggcgtgtgtgctaacctcgccacagtcgacctcaactccctgctgtacaaatacgaagtcgacatcgcacgaatcatccgcgtgcacttcaacgacaaacttcctatcccagcagagttccgcacacccaaaacccaggacatcgaaaccgagtcctctgcagtgtgggaccggcgtgcgcgcaagcgcaagcagcatatggataagctcctctggaaccctgagaagggcatgtacttcgactacgatacagtcaagaaggagcgcaccgaatacgaaagtgccacaaccttctgggcaatgtgggctggcctcgcgtctcccgcgcaagcagctattatggtcgaaaaggctctgccacgcttcgaggcgttcggcggcctggtctctggcactgaggagtcgcgcggcgcagtgggcctggaacgtcccaaccggcagtgggattacccatatggctgggcgccgcagcagatgcttgcctggaccgccttcatccgctatggctatcaggaggaagcggagcgactggcgtacaagtgggtttacatgatcaccaaggcgtttgttgacttcaacggtgttgtcgtggagaagtatgacgtcactcgtcctattgatccgcatcgggtcgatgccgagtatggcaaccagggcacggacttcaagggagctccgcgtgaagggtatgttcttgtccttactttctttcttttgttgatacttgggtgctaattcgaaaatacagattcggctgggtgaatgccagttatgtctatgggctggagattctcaatgcccatatgagacgcgccttgggaactatcactccctatgagacgtaccataaggcagtcgttgctcagaatgcattctgattgaatttgggttgctcttacagtcaaaattgttgcacaggctaaaagaggatagaaaattcaggtagaagtgagcaagatatttgaacatggtcatcaatccggcagtgtttattgtctagcgctagttttcggttaattcagtcttttcgtttgctaaaagaaggttgataaaataataaaaaagaatgggcgtcgtatattctcgactcacagcatgtgccagtagatgtacgccgtactgcgtactccgtatgcttcatgcaccccgcgatctcgttataacgaacccggtgttgacgagtacgaactggtaccggcgctttaattaatccggcgtaataatgaatttgccccttactaaccggcccttacatttgttaccaaaattacagaccctggcaagcagggccggttagttacaacgtacgtattggtccacttacatgtacgctgagtcattccacgacgaccaatcagaattcatggaataccgcgatgatccatccccacttccaaggttcttaaagctcggtccacctctcacaaggtcgctctccaggactagcggcgacttcctcttcgggagaaaatcagccaatggtgtatagagcttttccaagagttcgttgagatgaggaaatgaccgatattgaaggaaagcgttattagtaccttttcagttcataaatttggaacccaaatataaataatatatgggcccttacaagaaccctccacgtaatgaacatttagtcatgtctcagttggtcctaaataaataaatccggagtgggtttcgctgttcttaaagtaaatggagtccccgccaaatgagcttgagtgcctggagtaccccagaaccccaacccgaaccaaaggcgaaaataagccgatagatacctcggcagaccaaccagggctccgaccgaaaaaagaccgcatttcagagatcccgaaggcgtcatggctctccagatcgaaaattgacgggtgcggagttggggatccctcgttttcccgaggtagttctcgtgtctggggctgaggaattggtatggatgtatggatgtatgcacttggttctggtcatttatattcttgttgtttgtttgttttttttttgtagggggtgggtgtggttgttggttgtctcgttaagcttatctcatatctaatgttcatctataggagagacacgcgactcttcgggtgatgagtgtaggtacgatactagggatgttttctggaaatcttctagagaagatctagagatactttggttcatgttcttgttctagactctactttctgttgtacattccgtacagagtacggagtggttgttcctgatctaccagtcttatcggctctggatgcggatgcggttagtttggcagagctcagttgtgccgaggtccaactcgtaaggcggtttttgagtcattttcccttcgatcaacagggtggaccgcctgcgattggatagttcatttagaggtgtcatgtgttccggtctgatttcgtggagatgctgatatgcggtgatattcggcatatatagcgtaagtgtaatatagtgcaagtgtacaatatagtgcaagtgtacaatatagtgcaagataactgcgagtatgaaggattaccgcgaggatgtagactgtatagcttcgagactatagaacttgatctacgtctacttgtgtgcgcaccacaacaataaacgccgaaaatcgccaaaacacattccatggtaggaacactcaagtcaaagggatcttgaggatttgcctggtggatacctttcgaataccggggcatgacaaaacagcaaggatgactcaggcagacctcgttcccaaggttctgggcagcttttctctccgaatggcgattcttgcaattggccagacgggcgtgatattacggggagttcctagtctatttgaaattgtattattgaatattattccccatgaacattgctccgaatgcagtcgatgcacgtgaaaattagcttacgatatgtcccgtattgtcacggtcatggcatgtgtcttcgacgtcatccggccatctccacataaaatcgagcattcaacatctcacgccaacgtggaatcgagggggaaacgagaggaaaaagcacatggaatgaaactccctcgacgttccagtgagatgccgattattgtgacactaatggcagatttcgaaaacccagtggcaaagggttgtcccattagaccgaggatctgagcctggatcctctcttccgagacccgccttccgcctttcggagcactttgcccgtgaaagattcctgaatgattggaacccattggaagagtgcctaggcattgcgaggtattcgcctgactcccggtgagccgagcgtttaccgactgtgacgcatttgaatgtttaataagtaccccgggttttctggcttgtccgtttcctcttttttattatagcttctcttctcttcctcctccctctatatcccttcctaccttgcttcattctatattcgaagcttcagaacagacgtgacactacctgcacgcctgaatatactatctgactatatctttactatctttaccctttttctgtattataccaaaagtcatgggtctctacgaagatgaggaccgccagttcgcggcagaggttcaggccgttcaaaactggtggaaggactctcggtggcgctacaccaagcgccctttcacagccgagcagattgtggccaagcgtggcaacctcaagatcgagtacccttccaacgtgcaagcgaagaagctctggcgcattgttgaatcaaacttcgagaagaagcaggccagctacacctacggatgccttgagcctactatgatcacccagatgtgcaagttcctcgatactatctacgtctctggatggcaaagctcctccacggcttcgtcgaccgacgagccctcccctgatctggctgattaccctatggtatgttgataatacgatatcaaaagtgtggatgtatacttacaatcattctacaggacaccgtgccccgcaaggttaaccagctgttcctggcacaactcttccacgaccggaaacaacgtgaggagcgtgttactacccccgcagcccagcgtggaaccgtcgccaacgttgactacctgcgccccattatcgccgatgccgacactggtcacggtggtctgaccgccatcatgaagctgaccaagctcttcattgagcgtggtgctgccggtattcacatcgaagatcaggcccccggcacaaagaagtgtggccacatggccggcaaggtcctcgttcccatcagcgagcacatcaaccgtctggttgccatccgcgcccaggccgatatcatgggctccgacctcctcgccatcgcccgtaccgactccgaggccgccaccctcctcacctccaccatcgattaccgcgaccacgccttcatcgtgggctccacaaaccccaccatcaaggatctcaacgacctgatggttgccgccgagcaggctggcaagaacggtgcccagctgcaggccatcgaggacgaatggaccgcccaggccggcctcaagctcttcaacgaagccgtcatcgacaccatcaacgccggctcccacgccaacaagaagagcctcatcgaccagtacctcgctgcctccaagggcaagagcaacaacgaatcccgcgccatcgccaagaacctcaccggcgtcgacatcttctggaactgggattccccccgcacccgcgagggcttctaccgctacaagggcggcacccagtgcgccgtcaaccgcgccatcgcctacgcgcccttcgccgatctcatctggatggagagcaagctgcccgactacaagcaggccaaggaattcgccgacggcgtgcacgccgtgtggcccgagcagaaactcgcctacaacctgtccccctccttcaactggaagaaggccatgccccgcgacgagcaggagacctacatcaagcgtctcggcgagctcggctacgcgtggcagttcatcaccctggccggcctgcacaccaccgcgcttatctcgcaccagttctccaaggccttctcccagcacggcatgcgcgcctacggcgagctcgtgcaggagcccgagatggaggagggcgtcgacgtcgtcacccaccagaagtggagtggtgccaactacgtggataacttgctgaagatggtttccggtggtgtgagcagcactgctgctatgggtaagggtgtgaccgaggatcagttcaagaactgatttgttcggtgcggctcatgttgataccctgatggttttggctgtctatctctatatatgtgcttgatgtcttgtgtatgttgattgtggcgttttcctttttgtttctatggtcttgacttgattccctgtcggtcttgctctcctgttggatgagtgggggccgatttattttgcattttggaaatcacgacataattgatttacatcttgaatgaatgtgacttttttggtggttatttaagttatagtgtaaacctagagggaggatgttcttccgcgttcaaagtataaattagtgctgaacaaggacacctagcaaagttaatcattattagacgggtggatatttaacaaattatcattgaagatggataaaaatagagaagttagcgccccataaaggaccctaaatatatattgtctattaaatatataacacttagcgaacttgatttagttaccctagaagaattgccataatcaagaaatagagcacatttagagtcaagcacaaggtgcatgttcaccggtttaataatagggatgtactagtaaaaagacataacaagaatcatcggatcattgaattaggacataagaaaattgaatgaagaatgcgcccctccttccaatatcagtcgctgaaatattcatcaaggagtcagtaagtggtctccagccgtcagacgtgcaccagcaccgctgggcaggaacaaattagttaatgagctttacgccatatcccgacatgcctcaaggtccgaatctcacactcgaagcgagtagagcgcttgttaggagccttttcccatgcatccgtcgcttgcttgcgcttttgatttggcgacaaagattccaggggaggccgtggtattttttggagctgtgctcgctcaaagtcaatgaacattacccgaccactgtccttattccagaccatgtttccggcgattggatcattgtgaagcacgcccaatgcgtgaatagcatgtagcgagacttcggcttctttaattaaccaatctggttcaacatcgtgtggcttagccagcgtcttgcccgcataccccatcaacgtcaaatgtacaatatccgcgatgccgtcgtaagagaatggttgacggagaggtaagccacccagtacaaccggcacgtgcaccccctgtattggtcgaagacgcgaatacacactttcctcatgttgggcgtatttaacgaactcgactggcacccctttgccaacgaaagtatacccgtgagacagcaatgtcactttatggagggctccgcgtgagccatgaatatgcaaggaatcgcatcctatctccaagtcaggccgcgggtcatgcatggagagttgtcgatggaggagactaatgagtgtcacctgactgattgagtgtcgaccaactccatgatcccgcacattggggcatttctcatctaatcttcctctcgtgaccaagcctaagaggcactgctgtgtacaatactggcgagatttgccctgtgaggaagagcctcctctggatattactgtagttgatgatggtggcaagggtgaagaaccggcgaagcgggaatcccggggccttcgactgggggtatttgagtcgaattcgtcggaagaatcatcaaacccagacgaactcggaacctccaacggaacgcaggattcaaaaagtgcagtaggcattgatcgtgtcttgacgggagacatacgacagtatttgtttctgctctttggggacatgaaatcggaatctgaacagggtacatccttcaccttctctgcttcctcccaaaggtctgcatacaccattacccatgtgtccagattttttgctgccgagtttctccactgaatacttcgcggcggtgtttgcaaagctcggagggtaaaggccaacacctggccgagtgctgtcaagtgtaatctgttatcgtcgcctgtgttgccggtccatccagttgtatcaccaacatcttctttcggcagcgatagataatagtacacggtggaaggatcatcgtgtggaacacgaagaaatatgaatgcttcgccggtacacacatatccatactccagccctgctttgatcatgtaggagaacgcctgtgtgatgactgcagccacaacgcgccgacaagtatcttctggcttctcaacttcctgataacaaagcacgtcgtcgagctctatgtccgagagcccagcctttatatgagcaagcgtgagcttatgtggcgctttgtattcgacaatgaaggcagggaccctttcttcggggcctttgttgtacacacagaactggtccgctcggggtctagagggctttcgcagcataggattttgatcattcgcaactgactgagccgtaagttgaagttgagaagtatgcgactgttttgcggctaatcgctgtgagcggcgcggttgtccctgcgtcaagctcagagatcccatatcggccactatctctgattcgtccgtcaatgtgttcgcatggttttcgaaggtcacatccccattgaggtggaagactcgtcggagttgaggacttgcatacagcttctttatgacctcggcgacacgcaattcgatcgtgaaccgttcaaaatagccgagatcgagctccgagcccatcattccttgaacatcttgcccatatcgctctagcgtatgcctcggcgtaaagtggcgctggacgacaagatcaacgcacatgagattatcccatatagttgtctgctcctgtggaaattccacccactctcggatcctagccgggcgaagcttattgtctgcatttgccgggtcgcctttggtcgatgaatctatacaggtttgtacattcatgccaagaaataagtgaacatggcaagcatcgagaaactcgggaagagtggtatctcgagtctggatcctttcttcacttagttgacgtcgggtctcggcctcgcgttgtcgagcttctgccgcaagttgtcgagcttctgcctcgcgttgtcgagattctgcctcgcgttgttgagcttctgccagaagtcggcgcaactcggatacgtctggctccatttctggcgaattcttccaagatgagatacagagtgagaaactcgatgaagggaaggaagggtgaatttgtgtcgccttttctaggtaggagcgagcaaacaaagtaacaaccccgctttcccttagccaatcatatcccgcatagtcgcatagtaagtcttgggtggtttgtgatgcttatgttgtagaaaaagagaagagatggatacggtgtctttctgggtctttctgggtctttcttgtcttttccagtatctttgttggatattgttttgtcgggtcactcttatagacagaaaaatgcaaacagtgaaccccaaaatagtgaaaaaggagtaagatacccgtgttaaacagacagggatcaagagatatagtcacatgatttatggtgaacggctgcttacgtgtacaaaatagcatcttgaggtccaatggatggatcgcgattcgcgataatcccgatatttcattcaaagcctatcagatggtgccacttctgtagaatctacttgtactccgtactcagctaggaatcccacaatctatccatgtccacctccgaaatcaaatgatcgagtacgcaattagcacgctaattatctgtgacgatcataagagccagctggacaaagttcattatgtacagtaatgtagtaagcgagattctaggcaaggaactgatatactgtagcacgactattggcgattgccctccccgtctagggactacaataatatagcaactaagagtaccaagcttaagggcctatacccccactaccaggtatcaaagttgttatcatagggcacagaaagcgcctgtatactcctggattaggtgggagctggttgggacatcggctgaagaatgtttgagacaaaattgtgccgggcaaaggctaattatctacttggaattggatgtcgatcgactattattgttctcgtttactttttgcagctaatgtatgtacagctgaaaattgcggtcagtagagttggcaataactccatgcattgctatcttttgtggttgttatgctgtaaatatgtttactaaattcccccccaggactggataactcactaactggaacataactaaatatttctctaactacatctagttagtcgaccaagacggcaccaattaataatcaaaataagattggctccactttttaattcgtctagaacataataggattgcaggaagcgtcatgccggtcatactctagcgcacttcgtgtgaagccgcggttattctttatctcggcgtgacactcaataccggttagcccttggatttatgtcctcaaaatagaataaacataaaaaggaggcatcggtaaagaccaaaacaaggaatgagccgagagcttgggacaagtgcggggccttcacctaataggggtacggagtacggagacatggcatgaattatggagacatagacatacgtacggagggatattgatatcagagtggtggaatttgcctaggtaaaattactttaggtatagccgttgtagatcccattatgctattatcggggcccacatccacttatttatataatatccgtagacaaccgctcactttccacctctctttctaaccttaatttatcttaatttatcttcatcatggtcgaactacccgaatttaagactgttccgctggaggagattcctgtgcgcgtcgccacggcccgcaaggcgtttaatgagaacaagacccgtgatgtggagttccgtctcgtccagctgcgcaagctatactgggcgtgagtactgggttcttttgtcttcctggtcatttaactaacagttttacagtgttaaagataatgaggaggccattatggaggcctgcacccaggacctgaacaagcctcggttcgaaaccaacctcgcagagagcgggtggctcctgaacgacattgtcttcacgacgcgcaacctgcacgaatgggccaaggatgagaaggccaacgatattgatctcgccttcaagttcatgaatcccaagatcagaaaggatcccctgggtaccgtgctggtcattgggtatgctacccccatcctccacgatgcgcatgagaataccccccgaaggctaacaagactcttccctattccagtgccttcaacttccccttccagttgaccctcggccccgtcatcggtgctatcgctgccggcaacacagtggtgatcaagcccagcgaaaatgccccccgcagcgcggccgtcatgcagaagatcattgaggagagcctcgacccctcatgttacatggtcctccagggcggcatccccgagacacaggccttgcttgccgaacggtgggacaagattttcttcacaggcggcgccaacgttggacgcatcatcgccaaggccgctgcaccgaatctgactcccgtcgtgctcgagctgggtggtatcaacccagccatcgtggccaagagcgcggacccgcgtctcgtcgcccgccgcttgctctggggtaagctcctcaacgccggccagatctgtacctcgcagaactacctgctggtcgaaagatcgcttgttccggcggtcgtacaggagttcaagaacgcctacaaggagttctaccccaatggttccaagggctcctctgattacgcgcgcatcgtcaacttgcctgccttcaaccgcctcaagaccatgcttgataatactaagggcaagatcgtcatgggtggcactatggatgagaaggagctcttcatcgagccgaccgttgtcctggtcgactcggttgaggactccctgtgctcgcaggagagcttcggtcccttcatccccatcttgcctgtggatagcctcgacgaaggcatcagcgtggccaatagcgtccagagcacaccgctaggtctctaccccttcggtaacaaggctgatgtcgagaagagtaagtttccattttgttttcagtctatctgatctattctaaccctctctcctagttattgcttcaacccgctccggtggcgtctcctgcaacgacgccgcgctccacatcccaactctgccctttggcggtgtcggcgagagtggccacggtgcctaccgcggccgcgccagctttgacgtctgggtgcaccgtcgcaccatcacctccagcccaagctggctggagggcatcctggctatccgctaccccccgtatgccggaaagatcagcacgttcaatgctgccagcgctctgagccccgactttgaccgcagcggcaaaaagctgggtatgggcttgctgcgctgcatcttcactttgggtggaggtagtgcgaaggctggagccttcagggctactgctcttgctgccagtaagtgatcctttctaattttctttctgttcttgccaaattcttgccatttctgtggatattttccacatcttgcacaaatccgtcttgtgggtgggtccggtcaatattggagaatttttttcttcagacgaggagaagcgaattccgagatccctacaccaaccccgtggctccttacatggttccaacgacgaagacgcataatctctgcctatcccatatacccctaacctcatgtgctggcttgatcccgttctctccacgccgaggatgcccatcttcacgcttctcttccaatcatttcaacccgcagatcattatcatcaaagcttttgaaaatcacagtctaaccattaatagttgcctacgtcgtcctccagatcctcgaacgccgatctgcgaaattgtgaacgtgaacatgaacatacgtttgcccctgaacttggataccccgcttacgatctacggtcaatcactccttattttggtatggagaagttgggcttcggcttggattaggatgtgtggatgacttcaggatctttttgctatagtgccacgtaaataaatttgccatgtaggtaagtatgtacttgttggatttagttgctctttttacttttggtgattgatgcttttgttacgaatatttgagagctatgtatatttgtaatccattcaagtctttttttgctttcgaggctttttaccctgtagtgagtgtgtagcttatctagacatcaggaatttggaatggctccaattggagccatacatcccaaaattgggaacaacaagaaccccactagcctacagcattacaaggtacaccgctcattgagaatctagacagatccaacatttatatcatcattcgtgctgtcaaatgcagtgattgtcaaatgcgctatccaatcagacaaatgcctcggttcatctagctagccgaaaaaggaattaagtcaagtacattggctctagcagcgccgttcaacgccgcgattactcacgcacaggtacttgacacccttgtatggcttgacgccctcgcctaagccgcgactgcgacgctggtcgatgttgagactttccaccttgataccagaggggagccagcctcgcacggagaaggataccgacgccgagttaggcattaggcttgcattgacctgggctttggttctgcgtggggtgcgggatgtagatgatggagcgaagaacgcggggaggtgggcgttatcctgggattgtgatcggagagggggtgtgggagttttgtgtatggagggatttggggatggggtggtagctgcaacggggtcttcttccgcgtcttctggttgtaaggcagcggaacgggaggatttctttgtggacttcttcttcttctttttgcgcttggaggggtctgaggatcgagtcttctttgatgtgctggcagatgcatcgttgtaggaggtaggcgcctcgtaatagccttgcaggaggttggcattggcatcttcgtcggcatcctcgacactgtcatcaaggtcatcatcagatgatggatagcccgagaccccgcaacgcagtgtggcagttcctgtcagtgttccggcatccttgccagtgggaacccgccattcgaggagcccacttgagggggagaattgagcgtcaccacggctggcctgcatgtccgtgatatggcggacagactttgagatcggtacgctgacgacaacctcttcaagggccggtccggagcttccacttccgcctccgcctaggaatgacggtgttgatgtcccggatccgcttcgggtagctccaggccgggaagagctttggcccgggaaatttgggttcaaagtcagccgaacctcaaattcagaaccagatgacccgagtgatttacggatatccacaatagcaggtaggaaaagcttttccatatggcttggtgcctcatccagatcaggatctatgggaaggagatccacttcgtacccagccaggataaaccgcccgtcgggaggtatgaagctgagctcacccggccgttccttccatcgagccagtcgaacacatggatgaaataccggtagttcgatcttgcgaccaaggacatgctggccaccaggcgctgataacgatagcagtaggtccgggactcccgatattttcgcagtgaatgcaatggtcccggataccaatgcagacagcagtcgtcctgaaggagccatagtaacagagagggattcaatgatgtcgacatatagctcattagaggtatgtcgtacaccgggccgtcgccaaggaatggcgggtccttgtgatgcactgccggcagcgagagattgcttgagaggattggtagatcctagcgttggcgtagatgtactaaatccaggcgaacacattaatgccagataatatcgtttatcaagtcaagactactcacccaatcccacctagcagcttccccatccacccgggaacctcaacaacctcctgtaacgcattgggttcggtattgcatactattcctccatcgcacatttcattaataagctgcgcaacaacatcataattggcctggatcttagttgagagcagcggtgctccaacaaagtcctcaagtacatcgatcacgcgatgcaggaactccagcgccagaagcggctccgtgtcgacttcgcttattgcaagaaacaacagattcgactcaactgtcgagaataccgtcaccggcggtgaagcgctaggaatgtacagcaaggaagggcgtggttcggcatgggcaaggtagaggggcaggatggcggaggccgagggcgggcgggatcgatatacatgttcgacgaggggggcgctgggaagacgggttagtgtggtcttgcaagccgacgcggaatatcccacttttgctcgtcatatatgtaaacggcatcaatctcgccgctcatggtgactgttgtctgatgatgagatccatgtgtcggcgtagattgcatagctctcgtgttttgccgcggatttccgctttccgataactttttcgagacaacaggcatcaaatcatactaaccgggctctggtggtacggtctgcgtttgtttcttgttcttgtcccgaatatattttaatacgatctaaacacattcatctcctctgaaaagcgcgccatggctacccagctgaaagacgccaagcaggctctggccgaggacaagtacgacgactgtctggcctgcagagtgactggtatgtttatttttagcccgtgattcgggctggtattacaagcatttggtactgatattcggcaacaggatctgctgcttttatgggcctgggggtctacagctactacactggaatggccaatctccggaaacaagagaaggccatcatgcaaggcccctcaaaatacaaaatgggctcgcgaaagttagggatcttttcgatttcagcgacattagtgggaatggggctgtggcgggcgtttaattgagcattttatattgaacatataccgaagcatatggatgtgacgaaggccggggtcgagcaggctgtttgatagcgaagtgcaggctggaggttttgtaagatattgattgttatttagttgcaagccaatgataattgccactccgggtatcgggaatatccgcatctatatgctatatgacaaggggaagaagagggaattggataagaaaaagagacaaaaaaagatcaaagaaacccaagtaagacagcagccaaaaagaaaaaaagccatatgcaaaaagtcccttgttatgcacccgaaaagcaccttcatacccggaatttcaaccagccactgtgtgacaatcagaagggaatggtcgtcacttcgtcatcatataatgctttacccaggggaagccctaggtaaagcggcctcgtttcccaccccctcctgacatatctcgtccgttgttaagtcctgatagatcaaagaaatctgggaaagtgaatttcctcttggacccaatactagcaggggactcccgtggcgaaatgcgcgcgttggatcgtgggtggttgttgtgacgatggtgtggccgactgttgcggggcatcaccgacacgctcacaggagcgtcttgcatggtcgcagatgagttgtctgacgactgcacatccatgtcgagctcctgacactgagggtatgtaggaccggcagagaatgtgaagacggcaggcgtggcgaaagaagatgtttcgtggagttgtgtgggaggagtgattgcctctggcttagatgcgggtacgggcactgaagtggggggctgacgagaaattgtttcgggtgtaggtttttctttgcggacagtagccggagtagcacttcggtcacgcttgtctgcctctgtatcttcatcgctgctctgtgatccagttccgtcgcatttttcagttgcccattgtcggaccttccacccctctccgtctccgagaccgaggttctcacggtcaaggaagtggagcagatcctctatcgcttcctggtatcctgatgaccttgcatgggcttgttcacatactgcattcttgtacaggtttgtgacagacagagccgccgccttgaattgctggaggagtagctccgggggttgcgggcggggtgtcgagctcggaagagaggtgttgagggacctcatggagtccatggcagggagcaatgtcaaggccctgctgggcaacgggtttgaggacaaaagtgtttgtgtggacaacttctaatgccgtgcgtcgttcgtcggtagacaaatggcgatagcgaggagcttgcggtgatgaaagagagcagttggaacgaaagagactcaaataatataacaaacaaaggccagaacagccagaatcagacaaatcaggtagttggtcgcctacctgtgcaacaataagcaccaagatgtgtcaacggaggaactttcaaggttgttgcagatgacctggcccggtaacgagaagcccactttccgacggaataacaatattccataccgtaggccctaccgaaaggcggtatcttcatttgccgtcgacgcgctttgaataccttcccgtggttcctagaattattcaatagcattcattctttaggacccccctttatggattgcttcaacctttgaattcgtcttggactatatctagacagtctccctcacctcctcaccacttcgaccgcagctggttctttcttcctgcactacgcgacccgactagtcgcgcgcttccaatattctttgttgcacgcttacatacgtgcttaaatagccagcgcacctattctgttcaccacagataaaacatggctcctgccctcgcgtctgatcctgtctcgcaggcagatactcctatgactgatacaaatgacgacacggtccccttggtgcccgtggatagtgccgacgcgcaaatgacggtatgtgaggttgtgtctactcgcttgtttagagtgaagttctgcatgatttcttatgtgtttttttgattttttttgctctaagctcatgctaattttcactttcgcaatctagagccgccaagacaccccagattatacggtaaagacacctttggtctacaacgctgtttattagagggcgttgctaattatttgataggactctgacacaaatgcaaacaccactgcaagcagcgttgcgggcgacgccgcggccgatggacgtaggcgcagatctgaggccaatcacctcagaaaaagcatcctaggcaagaagcatggccgcctcgataatacaaaggtatgggctataacataaaatttccaatggcccatttgctgatacatggtatctcacaggaggatgattcgattcgccgattccgataccttctcggtctcaccgacctgttccgccatttcatcgagacgaatccaaaccctgagattaagcagattatggcggaaatcgaccgacaaaatgcagaggcagaggaaaaggcccgcaagggtactaagcgcactgggggtgctggtagtgagcggcgccgcaggaccgaacaagaggaagacgcagagctgctacaagatgagaagcagggcggcaataccactactgtcttccgagagtcaccatcatttatccgtggtgagctacgtgattaccaggttgcgggcttgaactggctagtttcgctacatgagaacggtatttcgggtatcctggccgatgagatgggtctcggtaagaccctgcaaacgatttcattcctgggctatctacgttacattcgtgatatcaacggacctcatttggtcgtcgtgccgaagtcaaccctggacaactggaagcgagagttcgcaaggtggaccccggacatcgatgtcctggtgctgcagggtaacaaagaagaacgacagcagttgatcaatgagcgcttagtcgaggaaaagttcgatgtttgcatcaccagttacgagatgatcctccgtgagaagtcgcacctgaagaagttcgcctgggaatacattatcatcgacgaggcccatcgaatcaaaaacgaagaatcctcgttgtcacaaatcatccgccttttcaactcccgcaatcggctactgattactggtactccgctacaaaacaatctgcatgaactgtgggctttgctcaacttccttcttcccgatgtcttcggcgattcggaggcatttgaccagtggttctccaaccaagattccgaccaagacaccgtggtacagcaactccaccgtgttctccggcctttcttgcttcgacgtgtgaagagtgatgtcgagaagagtttgctgccgaaaaaggaactaaatctctatgttcctatgtccgaaatgcaacggaggtggtaccagaaaattctggagaaagatattgatgccgtcaacggcgccgctgggaagcgcgagtctaagacccgcctgttgaacattgtcatgcaactccggaagtgttgcaaccatccttacctgttcgagggagctgaaccaggtcctccatatacgactgacgaacatcttattttcaactccggaaagatggtcattctggacaaacttttgaagcgcatgcaagcggacggtagtcgtgtccttatcttctctcagatgagtcgtgtactagatatcttggaagattattgttgtttccgagactacaactactgccggatcgatggtaccacggcacatgaggaccgcatcgctgccattgatgactacaacaagcccggttccgacaaattcgttttccttctcaccaccagagcgggtggtctgggtatcaacttgacctcagccgatatcgtggttctcttcgacagtgactggaacccgcaagctgatttgcaggccatggaccgagcccaccgcattggtcaaaccaagcaggttaaagttttccggtttatcacagagaacgccattgaagagaaggttctggagcgagcagctcagaaactgcgcttggatcagcttgtcattcaacaaggtcgttccggacaacaggccggaaaagcatcttcgaaagacgacctccttggtatgattcagcacggtgctgccaacgtcttcaacaccaagggtggagatgcaaccgagctcgccgaagatgaggatatcgagactatcctgcgtaaaggcgaagaacgaactgcagagctcagcaagaagtacgagaccctcggcattgatgacttgcagaagttctcctctgagagtgcgtatgaatggaacggcaaagatttcaccgagcggaagaaggacatcggcatcagctggatcaacccagccaagcgtgagcgcaaagagcaattttattccatcgataaatactaccgccaagccttggccactggaggccgaaccgccgacacaaagcccaaggtaccacgtgctcctaaacaaatcactgtccacgactggcaattcttccctcctggtctccacgagctccaagaaaaggagacggcctatttccacaaggagatcggttacaaggctcaattgcctgaggggcccgaagaggagcttagtgacagagaggctgagcgggaccttgaacaacaggaaattgacaactctgtcccgcttactgaagaagagcaagccgagaaagctcgtatgtcagaagaaggctttgcaacctggaaccgacgtgatttccagcaatttatcaatggatctgctaagtttggtcgcactgactacaagggtatcgctactgaggtggatagcaaggatcccaatgagatcaaagaatatgccgaagtcttctggcgccgatacaccgagatccaagactatccgaagtatctccgagtcatcgatcaaggtgaggagaaggtgcggaagatagatcatcagcggaagatgctccgcaagaagttggagatgtaccgcgtgccgctacagcagctcaagatcaactacaccgtgtccactaccaacaaaaaggtctacaccgaggacgaggaccgattcttgttaatcatgctggacaagtatggggttgagggtgaggatttgtacgaaaacattcgtgaagagattcgtgattcgcccttgttccgattcgatttcttcatgctgagtcggacacccgtggaaattggtcgccgctgcactactcttctgaacactgtggcgaaggagttcgaccccagtgagggcaagggccgtggtcgtgatcgtgatgaggaggaagagatagaagaagcaccccctgccaagaagaaggctaagaatggagctgctgtaagttttgtctgatcgattatctaatgttttgggttctaacttctttcacagccgaccaaacaggtcaaggccgtcaagggtggtagcaagactgcttctgccgccagctcccgggctcccagtgctcccgcaactaagtctaaaactcgcaggagataatcgtgtggatcgagtgtccacgggtgtgtacgttgctagtttgctacggttgttattggtgattcgggtattagggacggttttgttagggatcggcgcagatgatgttttaatgtacttttgtaattgaaatagagttacttgttctacttgcaaaggcttatcgtatattttcctgtacaatccctgcatattccgaaaacccccgcctgaccggagtccgcaacgccgtgcagatcggatgccaccctggcgccatatcacgctgctgaaacaacactaaccctgagtcgcctgcaatgacggaaattcaggtttctagacttggtctcaatctaaaaaatgcctagcctcctagctagacgtcgcaatacttaaaagccatgacgacgcttgtttcaagccccagttcattgcatgataacatcccatagtataaatacttaaggagaccccgcgctctagccatccatgctcaaatttctcaaatcaaaactatccaagtcccccaccatgcctagaatcaacctcatcgcgaacccgcactaccagaagtccggcacgaagtcgtacttgtacgctatgcgcaagtatcacttcacgccgactaaggaaggcccgtattttctcggtaccaggatggtgcaaagtggccgacagtacaccaataagcccgtgggaggccgtgctcggttgcagcaggtgctgcagaagaaggatgctactagcgatcaggttgggcaagtgagtgccaacgacgtgcagaatgactcgatgtatcttgcacaagttgctattggcacacctgcccagacgctcagtttggacttcgataccggatctgcggatctgtgggtaagtggatttctttcgctcttctccgtgcgatatgaacgttgctaagattgtctaggtctggtccacggagttgccgtctaagactttgtcggcgtacaaaaaccatacaatcttcgatccgaccaagtccagcacgtataaagagaaagaaggctcatcgtggcagatcaagtacggtgatggctcttctgcctctggctcggtcggcaacgataatgtcaacatcggtgggctggtggtcaaaggccaggccgttgagatcgctgatttattgtccgagcaatttgagcaaggtgctggggatgggttgctgggacttgcgttcggtaatatcaataccgtcaagcccgagcccgtcagcacgcctgtggagaatatgatttcgcagaccgatatcccgaagtcagccgagctcttcaccgcgaaattagggtcgtggagagactctgatgagccggataagggcgagtcattctatacttttggttatattgatcaggacacggtgaaggccgccgaggcagagatctactacactcccgtcgataacagccagggattctggatgttcgattctgcctcggcgacagtgaatgggaagtcgattgcccgggctggaaacaaggctattgcggatacagggactaccttggcgttggtggatgatgagacttgtcaggccatttatgatgctatcccgggggcagagtatgacaatgagagccagggatggatcttcccatccaacacaccggctaataagttgcctgttatatcttttgctgttggtgatacgcagtttgttgtgcaaaaggaagatcttggatttgctgaggctaagtctggttatgtctatggaggcatccagagtcgtggtactatgaccatggacatcctgggagataccttcctgaaggctatctatgcagtgagtgatatattcttggagttcacaatcgcacaagctaacgataattacaggtcttcgatgccggcaatcttcgcttcggtgctgtgcagcgaaaggagctgcatcagaatctctctgtgcctccggagtcaagctaggcatatgatatgtatcatgtaaacggactgtgaattactggagtctgtagacatatttattgtgagtcaaggaagataaattactacagaatgcacttgccgctatatgagaaactgctacgattcacgaatagaaaacatgagtgggttcctcgagctggtgtgattaaccctaattcaaaacagactcgaacaaagactcaaatcaaatactccaattatgtgctattgtacaaagatgtagtgtaaatgctagaatacatagttattacagtaaaatcaccacgttttctccttcttttccttcttggcgatctcaccgacagtcatgggggttcgcaagaacttctccatcaatagcgcggcggcgacactcacattcagactgtcgatgcgggcaggatccgattcaacgccgagaatagaactttgccgggcgccgggaatactgatgatcgcatctgcatgtgacttgatatgcgagctcaatccagtagcctcactgcccatcattatgacactaggcccagtagtggagggcagtttggccccgctttgatcaccatcggccgagatatgatccatgtgcacagagccaggaagtggtgcatctgcagcatagaatcgccacccgttttgctgggatcgctgaataaaatcaacttcatttgtcacatgaagaataggcatgttttctgctgcacccgcagaacatttgattgtgataggagacattggtgcggagttgcgaccagccagaacgattgcatcgacaccgaggaaatatgatgagcggatgatagcgcccatattaccggtatcaaccactccatccaatagcaagacaattgggtatctatggcgttgttcggcctcatgcggggacggagaaggatgatggatctggatacgatcatccgtgccatttactgcagcttcctcccgggtttgtggtgcaagctccgtccggaaatattcctcggagatagatggaacagccaggaggccacgcactggtaattttggtagaggagatgcctccaaaatgcacccattgtgagggcgtccagcactcatcttgtccatgagtcgatcccaccctgcaaatgccatttttactgcaatgttctttgacaatgctagtttgcggattgtgacctttgctgcacttagctcttcctccgtgctctgatagatatagagcttgtatagttgacgccgactgcagcgcagcgccgcctctaccgcactggtgccgtaaatgaactcagatgctggtgtggtgtaggggattgtatcgggcactttgacgttctctttcacccgctctggcatgctgcgcgtgactcggtgagccctaggtcttactggctctttctcccgtggttcatccatccaaggtctttctcgtcccgattgtgcgaatggactgtcttgtgttcgcgattggaatcgtgattggaatcgagattgatgttcacggggtagtcctcggaaatcaccagaacgaatgaactcatcctcgtcgaactcaaacttttcttcttttcggctttctcgtggtgattgagacttctcattccatggcgattgtcggcggtcatagtctttacgacctacaccgtccgatgtccagggcttttttgctccgtattctcgctcaccctggccatagcttcgacgaacaccggagttaaatcccgatctctcgggcttctgttctccatactgtcgtgctccatctgttcgacggtcattgaagttggtttggtctgatctctcgtatttttgctgcccatactgtcgggatccgttggtttgacggtcagcgaaattagattcgcctgatctctcatactgtcgcgccccgtatttcccctcgtattctcgttcgcgtttaggaaaacgagtgtcgttgccgcgccgattatctctgtccgcggtctgagatctgcgaataccttcgccaattgctgaattcaatgatgcatgccgaatcgccaagaccgtagaatgcgaggagcggatcactctagaaagaccatccaggcccgttcttgagatagtactgagcatcgcgacgaagttctggtctttgcagtttcgtccgtgcggctttggagaacttcgacatcgaattgcacgatcggtatgtaccctctgccgtacttatcgttatcggatctagacgcgcaacgcgaacttctcgtgtatgccacttaatcttcccacttagtcttctcgacttcgactttgtttttctctctcactcctcttcttcatccattcattcgttccgttctttatcaatttgaattcatctttcctttgagcatccagtccacgcaaagtttgctttttttttcccattgggatctgcaatcctatcatcaatcaaatagttatccattcactgcttagcttcagttcagttgacttttcttttctctttgtaggagccgcatgtgcggttcctacgccatcccaatttgctgattcttggtccaatcggaaaatcaccatgtctcaatctagagacaattctccaggctctgatagctctgatgatgctgatgctgtggctgcacaattgctagcacagttccagagcgctccctcttgtactcctcccaccatcccacctgagggtcctgaaaatgccctccagccagtgcaacatatcactagaaactcaaaagaatcaacaatgtcttttgagatcatcgtcccagtggttaacaaccctgatgactatgagtatttgcccggtcactttgaggttcatcgcattcttgcagtcgacatgcatgagccaaagctcattgtgagactcaaaagtggtgaagttcaaactgtaagcgaacacaagtaatcaatcaatcttaggcgccgttcaactgaccatgactttcactagatgaccaccaaagatttgaaaagcctcaagaacggacgaaaggctttgcgtgaattcaaccgtgactcacagagccctgaccccctcgcaatggaccactcccccatcccacatttcatttacgcgggtggagatggtcctgcggactatgattcagatatggactggggaattgcacgaaaccgccaacgacgcgcgccgttggtctcatacaacaatttcttccgcagtgatgatgaagaagatgaagacgactatcaaagccgccgtgaagagattgactcagaggagtccagtgatgaggatgaagatgaagatgatcctccaaccaaacgccgccaacgccgccctccgagaaggggtgcgcagaggggccgaaagcaacgtgatcgcgaatggtctgaacagtcttctgcctctgatacaggcaaacgagtatcatctcgcctgcgacagacccgtcgacgcaatatgaaagaacgcttcgaagacgacgaatattctgcggttgaacctgagcagcctaagcaccaaaagttctcgggtgcgagggagcagttccgtgaactaccacaggacaataaattcagattgtgccactcccagtcatgcacccaatgcggccatggagatcatgaccgtgaaaaggggtctttggtcttctgccaaggttgtaccgtgtcataccatcaaggttgtcttggcgatcgaaccagccgaaagcacttggtcaccaaggttgacgaaggggatttcattcttcaatgcagtcggtgtttggggatcaagcaccaagagcatgacatgaagcctcatttaggccattgtgccgtgtgtagagacgaaggacccatgtcgcagccgttgcgagagactctttcttcccagactgagcagcacttgcgggaagccaatggtggcatagatccgattactcccgtggatatgtccagtgtcaacaatgtcgataatatcctcatcagatgccttggtggcagccatagctgcaagcgagccttccatattcagcatctaccaaacacggcagaggagaaccttacccacattgatcctgataactggcaatgcgacgaatgctctaaatcacctcctggtgccaatccaatccaggtgatcgttgcttggaaaccaaggaatcccgaagtcaaagtcgtctcgcagttggttgagatgatcccagagatcgacaaactatatctcgtcaagtggcacaagctgtcctacttccgtgttacctgggtgactggagactgggtctgggccaggattcctgccagccagatgaaggcgtttctcaagtcagaaagatccaccaaaccgattatgacagtagctgaggctgtccccgaagacaatctgcgagtggacattgtttttgatgtggaatatcacaccgagcctaaatcccaggaggatcgagcaaacgccaagatggtcgaacgggcatacgtcaagtacaaagggttgtcatacgaagactcagtctgggaaattcccccagaacagactgacacagctcgttgggaggatttccagaccgctcttatcgacaaagtacgccaagagaatgtccacgtcccgaagccgaaagatcttcaaagccgtctcagagatgtccgtagagagaagtttgaccagagccttcttctgactgctcagcctgcgttggtgaccggtggtgagctcatggattatcagatggaaggcgtgaattggctgctgtacatgttcttcaagcaaaccaacgccattcttgctgacgatatgggcctcggaaagacaatccaggtcatcaccctattcgcggcattgatcgataagctagactgttttccattcttggtcgttgttccaaatgcgactgtgccaaactggcgccgagagatcaagagctggtcgccacacatccgggttgtcacctattatgggagtgccttcgctcgcgagatggccagggaccatgagatgtttgacgagaatggcactctatgttgccatgtggttattgcttcgtatgagagcatggcagacgatggggctaagcgagtcttgtccagtatcaattgggctggcttggtggttgatgaaggtcagcgcctcaagaatgacaagacccagctctatgagcgtcttcgtcgcatgaaattcggtttcaagttgctgctcactggtacaccgcttcaaaataatatcagagagctcttcaacttggttcagttcatcgacccaacttacaatgcggaggagttggaggccaaatacgcaggagccctcgacagggaagcgattcgcgagctccacgacatgattcggccatgtctcctgcgtcgaacaaaggcagaggttctgccgttcctacccccgatggtgcaaatcatcattccagtttcgatgtctgttgtgcagaagaagctgtacaaatcgatccttcaaaagaacccgcagcttctcaaggctatttgcaagaagcaagtcgggcagttgaagaaagcagagcgccataatttgaacaatatcctaatgcagctgcgcaaatgtctttgtcacccgttcatttataaccgggacatcgaagagcagactctggactctcagctttcccatcggcgtttggtcgaagcatccgggaagcttacgttgctgaacttgatgttaccgcgacttcgagagcgtggacaccgcgtcctcatcttcagtcaatttttagagaacctcgacattgttgaagacttcctcactggactgggactccagtactgtcgcctggatggaaacttatcctcgagggaaaaacagcaacagatcgaccagtttaacgcgccgaaatcccaattctttgcctttttgctttcgacgcggtccggtggtgtcggaattaacctcgccactgccgatacggtcatcatcatggatccggatttcaatccaaaacaagacatgcaggctctgtcgcgtgctcatcgaatcgggcaaaagaatacagtccttgttttccacctggtagtgcgcgcgtcagtggaggaaaaaatcatgcagaaaggtaaaaccaagatggcactcgatcacgtacttatcgatcgcatcgaggccgatgaagataaagaagacttagagtccatcctcaagcatggtgcggaggcactgttcaatgacgatgactcggcagacattacttacgatgtggactccattgacaagctgttggaccgtagccaggctgagcaggtcaagaaaattgccagcgagggaagttcggaccagaatgagcagacgcagttcaatttcgcccgggtgtggcaaaaggatcgaggtagccttgaagaagtgactgagactgaggacacgcctgtggatgttacggcgtgggagaagattctgcaggagcgtgagcgtgaagcgcaggaggaagctaaccgtcaagctgaaggtcttgggcgcggtaaaagaaagcgcggcacaccccgctacaataacaatattgttatcgaaggagttgacgacgatgagaatcttagcccccgaaagccgcctagcaagatgcgaaagcgtgcagctgacaatgacgatgagttccaacagccagaggatgatggtgatgagaccgagttcgagtccgatcacggcgctgagccaatggaccttacatacgatggagctgagccaatggacaccgcaaatgacggcgacaggactgaggcacaaatgggcactacaaatgttgtcacacctggtcttcatgtaggtgcaggacagcaaggtgagatctaatccatattccatgcgtatcctagttattgcttttttttgttttttttttttgattttaataccctatcattccgtattgccgtgtaaagacacagttcgttaactgtacatgattctcagtcgcacgcgcgttccgttgtgttaattccccgcccccagtgacctaccaccttgatatccgtccttgtgtggcgtgcaaacaacgccacatccctgggcagtgcccactccgttcggctggtgtcgagttctgtggcctctgcggcctggcgcactggggtggccgccggatctgcccccacctgcagtcacgggtgcaggtcagccttatgctggatacgctggaagagagcccggaggacccggccctcatccttaaggcgaaaaaataccttcggggtgttctcaaatcaatggggcagactgcccggagcaaggcttcgtctgccactcaggcggagtctcggattttcacctcgccctcagttagcggggtgagccgtgcccctaccgatttaacaggggcaagtactgagtcgaaagactaaataatgtctactgccacggccggccccagtaggggcgtcttttgatcactttgtgattaccgtcagagatgagccgcggctcccctctttctttctctgatttttggtttgttttgttttgtttgtgtacttgcattgggagagtttggtatgtctcccaaaaaaagggggggttgttctgagcgttatgagcgaaagatacccagctttgttttgatccagctttgttttgatacattgagtaaattgagagaatcaatatgaagttgtatgattatagtattgcatgttgtactccgtagaacaagtaggtccactctgatatgcgatggtatcgcaggaaagtagagagatcgatgtttttagttatttgcatccatttcttttgtttctatggacctttgagcaaatactttactagataggatagtttccgatatcaatgacgactagaaagcagtccaaatcaggcaaacatttaaatctcaccatataagccgtagggatttttagtggtgacacgcaaaatctttaaataaacaaagaggtgcatacggacatccttcttcatcactccacatgtccctcttccctgcctccaccgctactgaattcaaacaagaaccatcttactaggatactgatatgccattagccttcaagatccagccaaatgggccgacggcaaatttccaccactctgactctaagcgcagtctagtcccctacacatgttccgagatcccttgacacaaagccaaaaggccagctctccatcgtatgtttcaggcaatggggagagtaactaaggcctgtcaaaggccactgaattgtcatattatccatgggaactattccagttgtggccagtgtctggcagcattccgcatgttttctagtaaaattacactggtctcgacaactacaacccagctagcttggtgctagctccatctaatctaacaagagacctgctgcaactgaagcatgagctgaacaatgacttggatgtgggtgaggtcgtcgaagaaaagaaacggatcaacagcagaagaacacagacagaatcaggttgaggaatcgagaacactggcggaagaacgcagagcgactcagctcgagatctcgagaatggcgacagaaaaacgccgacagaatcaagtcaagaaagcgagaatgctaccagaagaacgcttcggtacacaatcaaaataacgcgggggaaatccagccaagatgataatggagacatgaaatgaaaggaagtatctcaatgcaggaattagacaaccagttcaagcaagaggaccggctgtcaagtccctgggatgggttgtagaagtggagcataccatggccaaggtcatccatcaggatagccttggcagaattgcagttgataaattttttcgtttcatttgttttgtttctatacaagggtttatttggcttggaatcttacgctagatttggtggatttgcaacgttcggagattttattctgcagccaatgattgttggcttcggaaaatttaggttaagctaagccacccgtacccgagccgcattgtctattgtgacaacatgcaacatgacgggaaagaagaacagcaccagatgatatttcttattggattctttgggctcatgatcaatttcgactttgtgcctctagatgtgtttataggctacttgcaggttagatgggttgtggtagttgtggtgaccgcccgaaagcactttgtcctattttcaagcaagcaatacaagttttccttaatgtgaaaaagaatgcctagtagcttttctagagtactgaaagtaagatgtatagttccaaggtaataaatatagttggcataaggtggaaagggacgctacgataagtcgtaccgggtcgaagaggtgtatatttacgagacaacataactcacacagacctagacgaaccaagagactaaatcattgtgtcattctcatatagtaagacttcaatctttgtttgtactagtatattcttcgtgtcccaccctctacccatagaaacaatacaaaggacatgagtattggtggagccttaagcatatgtagcattgatataagcacattgaaggcaaggaacatgcagaagcagcatggaaggtcagatttagaattggactaagtatgttctgcaggtagccggccaaccttgccaagacacacgtccacgatgcctttacgcgccaaatgtaacagtcgccgaatgatacacagcttattcgtgcctttaattggtctattcctacactattctagatctatctgctctttgatatgcatagaatgatgtttgcatgccacctgcaacattgtaccctcatttcccggtctgatggaccagggcgtctttgtcatggcgaccttattgtgagcttaaacacagatagatcccattgtgtattcagtatatccgatgtatctagaatagtatagttcattgagtagatctaattcatatatctctttgatatgtagatagttagcgcaaggcaggcttcatgagctggggctctccaatatatgagattgtgttttcccgaatctcagtttcccatcccatcttcccattttgctattgtcctgtttgtcaactctagggctatcaccctgtcacctgtcacctgtcacctccccccccttctcgcacaaacacttcttcccacctattttcttcatccctcttacctcttcctttctgtaccatacagaccattcttactgcacaatcctatccaccccagtctctcatctttattcttgagcaagatttgccttttgtcaagatggcggctcctggtcgtcctcaatttttctgcacccgtcctgatgggtccttgactcctctggtagcagttgatgagctacccactaacgtcaccatccatggtgcccctcgtatcatcactgctggggagacccagggtatgaccagctgtggcctggctgcccaacgtcccgaaccttggtctgtcgagggacttcccaagtcctctgagggtctgcctgatatgcacagcctcttgctgcagcttatcaccgataagaatgtccctgaggacatgcaggcatctgccaaagccattctcttcaagggaatcgacaacggacgtgtcggtcaaggcactccttccaacggactttctccaatggcgccgacattccagacaaagaacaaccacgtcggcaacaagcatgtatggccaagtgttcctgtcatgtcatggtccattatttaaccctttcaacataggctccgacttccaagaaggaatactgctcgtactggattcgccacggtgaatgcgattactcccagcaaggcaagttgaccacatgacggagactctatgaggccttgactgacccgatgtcacaggttgcttgtacaaacatgaaatgcccaatgagcaggagttgattgagaaacttgggctgcgtgatattccccgctggtaccgcgagaagttcaacgtaaccagccttttgcacccaaatcgtaatcgcccccagctgaccattgcggatcagcaaccccccatgcgggccctgccgtcctcggcttcgcctactgacgagatcaacgccgacaaggcgtccaatgtctgtgaaaccccgaaattgagcaagtctgccgagttcaccaagtcccctccccgtggaccatccaaccgtggaggtcacaacgggtttggtaaccgcggtggccgaaacggggctcccaatggacatcatgtcagcaactggaaaggctcccaccgtggtggccgtaaccgaaacatgggctcaactcgtcacggtatgatgagcgagcgtgacagcgatcgcagcggcgagtgttccccccgcgcctcagctatcgcccgttatgacactcaggcatttggccgcgatcaagttcgcacccctatccccgcgctgcgcagcatgatcactatcgataccgaccaacgtcccaacgaatgtcttttggatgacggtaactttcaaacccggaacctctaccggaatatcaatagcctgaccgagtgtaatgaagataccttcgaagacgccctgaacaagccgattgagcccaaccaccgtgtccagtcctcccacgtgtaccagcacgactcgaacacttcttccgatggtggtgtcatgttccccaagaaccatgccgcgtgggattcgaactttggttcattcgctcacgttgatatccctgctcgcaagcagtcggagtcgaacagctctcgtgccaccgtccagagggattacggatcttccactccccgcattggagatcttcagctcaacgacaatgtgcccctgagctcgaatgacacccgtgtcacctggggtcccattggaggtcccattctcaagcgtaccagccctcctctcgagaacatctcgcacatgtttggaccttactccaacagtctccgccgcagcaactaattggattgtctgaaacaattcagtcaggcatgcttggcctggagtggtactcatgatttcatgatgccgctccctgattgtttcttcaggcgtatgagatctggtgcttggatgttgttttctttcgatgtcgatctaccggataattatgccatatcataccacaggctatacccaagcaaatggaatagtcatgacgacaatcctcatggtggagaggcagttgtggtcaattttttcgtttctttattttctttatttgatttttattgtttctttgcgtggcaccgttcaagcgtttcaagcgttcaaaatatggaaaaaaaatgtgcccatatggagttgtgatttttgcgtgttttgcttctattcttatttacctggaaccgcagcggggccttgttccatcatggacgggatgttgttgttttacagaggaactgggctatgaccagttatcaatgcaatgttttattgccatttcggttctctagtagtctctacgcagttgcgagtaaagtagagatctaagttgtactcgctggtaagtcaagcggcaaactacaaatggaacaacagcgagccgccaatgcatggaataaaatgactatagtacattcgaaagaaaaatgccaaaaatcctgaaatatgcgcccgcgcctcgcaaatgtttgacaacagcttctcaaacacacccaatatacagttgacgacatccattaccggcgagccacctttttccgagcgccaaccttgacagcaacgcgctcccgctcgtcagcggccttgacctggagagcagggttgagtgaaggcagagtcttgatagcctcggagacaaccgaattaccgtccacaagggcagctcgctcttcctcggcaactagacgctccttgcgccgcgcagccagctgactccgacgggtctcggtcatgttccaggattcggggaattgcagcttggtcttgggcctgtggtggcggaggtcgagcgggacatcggcgaaggagtcgccttccttggcctccttgatcatcgagttaacgagatctgccaggtagcgcttgttctgggcgcgcgagccaaacttctcgctcgacatgcggatgatatcggtctgcgggttgtagcgcggaccggccagcttgaggaatgtttggcgctgggcttcggtgagatacttgggagtcaaatcttgggagacaagctccacaacgaccttcggctctgctgggtgctgttcacccatgtaggtagtgtagcggaagcgcagaatgtgggtggagggaggcagggtgaatggtttggcgagctctagttcaacgttagtggaaagactagtccgatgagcaattgatcttactgctcagcattggcatgtcccatgcggtaatgcgggcatattctctcatttcacggtgcaattccatctctgcatgtgctagggacgtgatttcgtcgtcattgatttcctcatctccatcctcgagtgtgttcaccaactcgtcaggctcgtcttcagcccagaaaccagcccgacggggccgaggctcttcgaatcggagatcttcttccttatcaatccttagcatgctctgctcgatttcctcaaaggccgcggcgcgcttcctggggtcgttgaattcggcaaccatgcggatgttctgttcgtcgaatgccgcgcgctcctcgggagacatcatatcgtacattgagcgctgctccttgggaaggagatcgactgagtactcaggcattggggggaaatcctccggtctgagttccttcggcggaggaggaatcacggggtcatcctggacgcgattgagcggcgaggcggagaagtaccgagcagatggggcgatgaggcccctccgagccagatgcccgaccgggcgagtcagtaaccgagctgctgaagccattgttgagggtatagcgtgggtagggacaggatctcaatcacgatgttttccgcttccacttttgcgaggttcaccgccgtacgctattccagattaggactagtgtagttcgttctcacgtgatagcatggtatatgctgatctttggattggacaattcccttatatggagatgatgattgactacgagagaacttttcaagactgattctctgcttacttcgatctaataacatcgccactatgaagttatgttttgtgactgtgggggccacggcttcctttcagaaactacttgaacaagtacttaattcacaatttctcgagatcctagccaaacacggctacacccatcttcttgttcagtacggtaaagatggccagcagattttccaaaacttcgtcgatagtgaccaacccgaccacggtatcaccctagggggcttcgacttccagccgagcatcgatgcccaaatgatgatgaccgtggaaagagaggctctggaccaaaagcgcggcttgatcatttgtcacgctggtatgaaaatcaatattcgcctgtccaatatggatgccctgatccacttaccatctcacaggaactgggactattctggcaggacttcgcttgggcgtgcctttgattgtggtccctaatccagaccttgccgataatcatcaacaggaactagccgatgagctggaggaagggaactacgtaattagtagttctgtcgagtaaataacctatcctcctttgtcttggccagtctggctaacctctgacagggatgtgggcagtgcgattagcagagcagagactcagaaagccgaagtattgtctatgacacctggaaatacaactcttgcggaaagtatgtctgatgatttgtgctttttggactaaaggaatctctggtggcctctttccgccaacactttttgttgcctggatgggcttgagcgctggcttttatcacgaattacgacgctgcatgaaaacaaaatgggaattaatcaagcaattggtccgagttggtctggtctatggagttgagaggagacctcatgatatacacgaagagaatcaattacttctcgacccattaaccactaccgattagcttttagtacaaatatcggcccatgtgtattatcgcactatatatcgcactataatcagtaaaatatttaatatctgtaactcgaattatcgttgaagtccaattcaccaggcgcggactagtggcccaagctccttgttgacaattcccgatttgcggatttgcggtttcgcgtccactcctgaatcgacaacatcaacgcccagccaccgaaacactatatgcgccttcaatcaacatccactccgttgatcctccgagtctcccattctaggccgagaggccgtctgtacccgcgcgtgtccttgcccgacctcacctcccatccccaacactccccgcaatggctgaggcaactctccacaacgtgccgattgtcatcgacaacggcagtggcacaatccgagcaggctttgccggcgaggaaattccatcatgttatttcccgtcattcgtcggccggcccaagcacccacgggtgatggccggcggcctggaaggagactcattcatcgggtcccgtgcacaagaactccgcggactgttgaagatcaggtatcctctggaacacggcattgtcacgaattgggaagatatggaatcgatttggcactacgtctacgaaaacgagctcaagaccctccccgaagaacaccccgtcctcctcacggagccgccgctgaaccctcgcgccaaccgtgatatcgcagcccagcttatgtttgaggcttttaacgtgccggccctgtacatgtcgatccaggctgtgttgtcgctgtatgcgtctggtcggactacgggtgtggttttggattctggggatggtgtttcccacgcggtgcctgttttcgagggtttcgctattccgaacagtattcgcagaattgatgttgctggtcgtgatgttacggaacagatgcagttgctgctgcgaaaggctggacatgtgctgcacactagtgctgagaaggaggtggtacggatgatcaaggagaaggtctgttatgtgtcgctggatccgaagcgggaagagaaggagtggatgaacagctaccacaagtctgatgctaaagcaatggactatgttcttccggatggtcacaagatcaaggtatgtctacggaaccgttcgtcttgggttatactaatgggcttgtctagatcggccaagaacgttaccgtgcgcctgagatcctcttcgatcccgagctcattggcctcgagtatcccggtgtgcatcagatcgtgcaggacgccatcacccgcacagatctcgacctgcgaaaatcgctatacctcaatattgtgctttctggcggttcaacactgtgcaagaacttccctgatcggttgatgcgcgagatcaaaaaactagccgtcgaggacatgaagatccgcatttccgcgcctgccgagcggaagtacaccacgtggattggtggtagcattcttgccgggctgagcacgtttagaaaggtatgttaatccctcatgtctacttcatcattgctgactaaatactgtctagatgtgggtaagcgcagacgaatggcacgaggatcccgaggtgatccacaagcgatttgcataaaggcctcgtctctgacgaagtctttgatatcatggtggccttctaccgagtcactccggatcacatcactgcctccaccgcgatcctaggcaccatctcccattccataacaaacaacacaagaaacagatcttgtcactggtcgatcatcatgcaattggcagtgcataagaagtgatcgaccaacatcacaatccgagtcgtatcctgactcttgataccccagcttcaattttcttccagcttatgtcgtctggcattggctctgactttgcaaatacagtctctgcgtcttggggatggttctactctagacataatttactcggacatactacagttctcgtcatggattccctgcgtagattgattagatccggtagatatatttgcattctacttggaatatttagtgcagtggcagtcatctgattcattccacctctgactatgggtaaataatgccgatgttcattctccaattctccttctcctattcatagttatgactcaactacatgtagtcatagtctcatagattggtaaccaaccaagtacccgaagtacccggatggaagtcatgagtaagccaaggaggcaatttctattttaaacaaaggatcctattctattaacggttgcacgtcttaatagagaacaaatatacaggcaaactatgaaaaagaacacgcatgtcgccacgtaccaaaacacaaagtccaaaatatcgaaaccgaaagcgaatatcgaaaccgaaagcgaaatccacatcaaccgaataataagaacaaagagaatggaatattctagaccggagatcccaaataatactagtttctacgctgtacagacagacacctgtggatatccccaaacatcatgtccggctgtcatcgcctagcagcgggtacgacattacacctgacgtgcgagtatattcgccataggtggaaccgcacccggcaataccacaacaagcacgtcttgaaagtacggaatctacggctacaatgatgtaattggagatatttttgtttttttggagacgtgtaatccagccagggaagacaagaaccccaagcatgtattgtattttgtatttggtattgtgatttgtttagacccatggctaggaagtagtagccctcggaatggcgcaatatggggggaatattgttgaaagcagcaaagaaatacagaaaattgcgacacagagtagagtaagatggagcaatgggaaatgggtaatgggaaatgaaaacggaactccggaatgatgcaaccagacaagtgttgttcgatggcgcgatcttgggtatgttgaatttgagactactccgtagaagaataggacccggtttccagaacctggcgttgatgcagggtggtttggctctaggcgcaaatgaaccacaaagaacaaagaaaacgccggtttgcccatggttgagagtgaagaggttggagtttcatgcggaaacaaagagatggtgagggaattcgactcggggtatttccatagacagcagaaagaaacatgacatgtagtagtagagggtattgtcatcctcgatgtttcaatccggtccgatggaaacccatattaaaaaatgagaatgagcatgttaaagagagaaaaggcaaagaactttttttgtcgttatgtcgttggtgtaggatgtagaaaagatatgctctaggcagtacccttcagcttgccccagcccttctcgagaccacgacgggccatgtcacgagcccgatctgccacggagccagtgctggagttggtagccgtactaccagccgagtacttgcgagtcagaatagaattgctgcagtcgtcgcggaagatggtgttgccggcaccgccacggccgacgtggtagacgggggcagcctggcgcaggtcacgctcgagctcttcgtcgaagctgaagatggcgcgctcgctgctgctgtggatgttgccagcaccgccacggccggagacaaagctggttggcaggcgcgagtcgagacgggcgagagaggctggtccactggcgctgcgcgagtcggtggtcttggtgttcttgaggttgacgacgtttccacatccgccacggccggtgtagactgctgggcgaccggcgtgggggacagatgggtgcggctcaacgacgcggtaatttgaagaaggcatgttgatttgatgtatggtggttggggaattagaagtagatgtagatgtgatgtagatgggatgtagatgtatgaacagtctatgctgtgaagggtattgaaacttccatgaaggatttgcaagatgtgtggatatggctaacaaaccgcggggccctgatgttatatagtcccagggcccttttttgacattttcacgtttttggagtcatttccagatccaggcacgacatccagtcacaaggccgtgtgggggctttttgtttttttcttttttctttttgaattttcattttgaattttcatttatccctttccttcgtcgtcatcagcctaaaccagccagggatatttcccctttcgacccccctgtgatctggtgctacaatatgattggctgccagtctcccccagacaccctaactctggctgctttaccagctgtcctctgggcaacccagtcatctgactggggcggctccaccaatggtgagtggcaagacgtaacaaaaactggctgggcagccaatcagcatttccattacccccaggaaatgcagaaaacctctcatttcaggatcaccgagtgtccagatcctattgctttccaatgtcgagctcacgttgttctgggaatcacaccgcaacagatgggccatttcacgatcacgtcaggtgttgcgccattgggcattagatacaattgcatacatagaacatggtatacatcgataattgtatacattggataggatggaggattgtagtagctagtagaagtagctggttgaacctgaatattaccaatactcacgatgtattataaaatacataccaagagaaaaggtatttttctgctccagcaattgcatcatttaccagcccgtgtccactttctatttcagaacatcaggggctttgtgcaacacatttattatttctgcatgtccagctgatggttgcacaggtatataatgtaagttgatatatgtatacagcatatactccgtatactaatagtagttagttataactatatggtcattaactatagtaaaagatgaatacttaagttgccgatgaggaattatgctaaattgcacatctattgtagatcgcctgtacgatgactccatcgcgctggcaaatttgcgggatattctcccttggccccgtagatccaagtctagtcggctaggcttgcacggtacctgcccaggaggtgtcttccataattgactcaccgtaagtgccgagtaccctgcgcactgcgcacgcactgtgcacgtaagaatagtgtcaggccaacccctcggcagtcgtccagctgagccgaggagtccgagacagaaaagggaaagtgccgttccccagacaaaacacaaaatgacgttgcaaaagaaaaaagaaaagaaaagaaagaaaactcttcctccctcatgattggctgaattatccgagcggccagggaaccaaatcaccgcccttccaagattcgatgtctgtgcgtttcgcatttccccagattttcctttccccaactttttctgcgttggaccgagtcatgcgtctcggagcgtgatctttccagccctggatgccgaggaacccccgcttaaggggtaggatgcagaggaatgattccgcgatctcgtgggggcttggaatacgtgtctggacgtgacacggcgcttcggagtaggattgtcaggtgttaggttcctagaataatgtgccgatctcccacagggttagcgcctgacttgataatcttcaggggaacattccattgcccctcacatagaacacaatcctgttatgtcgagaagagaattactgtacagaatacacaccctcaaatgactagcgacacacattataaacgattgggtaaggccgttcttagtaggcgctttttcacaatgtaattgatctcacagccactaaatactgtaagccaccctcaccgtcagccacagtaaaggtctgtcacatgatgccgccggctagtttcataaagctactcttggacatagtcaacattgcctagaaatgacacccgaggaatgatcaaatccaaaatagtgatttcttcttttgtaaattcagtctacctgtcttagttttttttttactcccaccgttttgcttcaggccgacggagtaataaccgcactctcaacgctggacctacccaccaggtccgcaaacatagacggccgagccagcaaatcccgcggaggcccatactcagccaacctcccctgatccaacaccgcaaccacgtccgaatccataatcgtatccaaccgatgagcaacggtaagcaccgtgtagtcctggaactcatcccgaatgatcccttgcatgacctgatccgtctcggcgtcgacgttgcttgttgcttcgtcgaggatcagaatcttccctgagcgcagcatcgtgcgagctagacagaatagttgctgctctccctgtgacaggggctgctccttcatttgtgcgtctaatccaccacgcttctcgatggcgtcccaaacctttgttttcttgagagcgttgatgatagcttcgtcgggtaacttgttgctggggtcgacgttgattcgaacggattcgctcaagaagaatggctcttgtgggatggcgacgagacgactgcggactagctcccgtggcagggtttgtaggtcgtatccgtcaattgcaatacttccactgtcaaggtccaataggcggagtaaggatagcagaagtgagctcttgccgctaaattatcacctattgtcagtaaacaggagattcctggggaaagaagatacccaccttccggtccgcccacagatgcctactttctggccaggcagtatagacatggagatcttcttcagagctgggatggaggggctaagtactggtcagtgtcgtccatagtaaccaatcaaacctagcttacctgtaagaagccgaaatatccttcaattcaatagcaccatgctccggccatgtatccgggggagtagtatcttccccttcctgatactcaggtttgacagtttgctccaaattcttcaatctcgcaatcgctcccagcgaggtctctaattgtgtccagctgtcaatcaaaacagccagagcttggttgaatccgagaacattattcagtgccaggccgatagtgcccgcactagtcatatgcggcagtaagaccgccagggcaatgactacaacgccaactgccgcaacaaggagatcgagaacaaggttgagccagcattggatgcagtacatcaagtagaacggcctctgggtggtgtccagcagcttggtgttggtctcctggaatttctcctgccagccaaacgcacgaagtgtggacaggccctctagggtctccaggaaatgactgtacagcgggctccgggactcgagatcgaggaatcgcagttggcgcgacgtgcggaggtagaaccgctgcagccagtacacggtgacggcacagattggaatacaaacggacatgtaagatgagcccatcgcgataagtgctgtctgggaaaggatttggaaaatctctgtattctggattagcttacctccatgcttataccaccctggagagatacttacggacaaccatgcgaattagacaaagaggcagtacccggtcaatcaaaccgatgtcctggctgaacctgtgtcatgttagaatcgagtcatctactactttcagaggccttactggttcagtatcacaccactatcggtttttgcaaagaaagataaaggcgcgctatgcaagattagcagttgtcagctttaagaaagaccttcgcccttacccaacagcaacccgcaaaaggattcgatgaagattgagagaggagattggcgacatccagatcagagcccacctgcaccaattgttagactttcatctcaatttccttttgcgaaacgacacataccagaaggttagacagcgggaaagcatagcggcaacagccagaacaacatagacactcatatattttccaatagaacctccgttcacatttgtccaccattgaagccagatctctgtatactgttagcatccgagtcggttcatctagaacagttcgactgaactcacgctggaaggtggttgcaaaggtaaacaacgcagtacaagctatgaagccaaatgtccgaggccagccaaaagatcggaagtagtacgcatagactgccatgtcaccagtttggcgtgttagatctgcatcatctggtcccggcgccttgattttcggccgtggtttggaggatggctggggtgcactggcgacgtcctctgcactgaggacctcctcacagtcggaggtcgctatatctgttttctttttctggatgtcctggccgctcaaaacctctcggacctttccctcccgagttagaacgataacctggtcggcgatgttgagatggcgcactggaaatgattagttacgtcttcaattataggaccgattgtggtacataccggagtgagtcaccaggaggatagtagtctgcaaccgccgaagtaatccttgctcgccgaataagcggtctacgaccagtgcttcggtcttctgatccagggcactcagaacatcatccagtaaaataatactgcgtctagcgtagaccgctcgagcaagcgcctacaaaaaagaattagtggttggtaaacgttgagtaggatagaagctagttgaacgtactactctctgcttttggccgccgctaagggttactcctcggctcccaactacagtctgttcggcatgagggagctgcgacaggtcttcttccagagcacaggcatgaatggtagtctgaaaccatacatgatcaattttttcctcgtcgcaaaacccgcagataacatctttgatggtaccattgggcaaccaggggctctgagcacaaaaggcaatgtttttggtggagacggcaatagtgcctgcgtcgcagggtagttctcccaagaccgctcggagcagtgtcgattttccgcagccgacgggtcccacaaccagcgtgagggagccttctggacagtccatggatacctgacttatagctgggtcgacggttggtgcaggccggatcgtcacttgctgaaccttaatggtaggggtcgaatgggtagtagtctctggcactttctcaccctcacgcattgtcccgttgggatggctaaggctcacctctaagcttgagtcaccactgcgagaaccaccgagtccagtgactccgcgactatccgaacctgctggagcacgaaggaatttctggagccgatcaaagcagcctttcatggctgcagactcattaatcgcaaacataaggagggaggcgggttgggtgaccaaagttataatggagagagacgtaaaagcctggttcgtggacaggctatcggtaccgcgagcagtggcttgtgccacaaacaccacgaacgtcaggacgggggcgaatatcaacggggcagaagcaatggtgttcgtccacaatgccagccagcgaaatcccatggcggactggatttccttgcggcggtactcctgcacgctactctccaccacttcagtcatgcccatgattttcatgctcttcatcgaacccagcatagatgccgtgacggcaatgcgtttctgcacagccgcgttccagaccttttgctttccgacaattaatttggaaagttgcgagttggcaaaggtgcacactgcggtcggttagtgttgtttcaaacgttaataatctacaaggataggagctatcaacataccgacaatcagtccaatgggcagcacggccaccgcgcccaattgatcaaccagcagccacatgccgattgcaatctccgtgatgcgtgcccatacctcatggatattttgtaatcccacggtgacacgatcgatgtccgtgctcataagcgtaagcgcggccgattcatcgtacgagtcaggcatctgcaatgtctgactgtatacgagactgaccaaagagccccgggccattgcaatcattctgtacatttcacgcttgtagaggacggtagtgatctatcgaaactcagcatccaggatctcccacaggtcgagaggggtgcaggaacgacttacggcaatactgatgtagactaggaaagcagccgccataagccctaaggcatggctgcggagttgttcggaagccggggcttcgacaaaactgataacacggctgatcaggaatggttgggcgtatgtgaagccgatcttggccagtcgcggtccgacggccgacaagagggcccatcgcatgcatgagatagtggccatgatcaacgcgtagggtgaattggagtgcgctatagttttcgttagccaaatgatcaccgatggggagcattcaagtacctcgacgggcccagctggcttgcatccgttctcgaagatggaaggtagcgagtttgctgtccatcgagaaaagatcctcgattgatagcaaacgggcaaatcccctgaagaacagcggattgagccaccagaatagggtgcgcgcccacacatttgctgtcgcttcgggaggatggtggcgatacggcagcctgagttcatggatcttactctgtgcctcgaacatgagcagtattaccttgagacccgtcgctgcagtaaataccgctgccatgggcgtctggtcccccatcaggaagagtgttcgcgactgggggatatccaggacgagcgaagccaagagaaagactcccaagagggtggaaggccgaatggaacgagtatgctccatgtaggaaagcagacagatagacagcgcatcgaccaacgacagggcggcagccgggatggtcgcgaccgtttggacctgtggatttcgaacccataacactagtaaggcgacttggacaccaaacagagcaacagcggctagtagcttgctcgagcacgccagggagaaggagacattggtcttaaggctggtgcgagacagccagtataatcggaagggaacgataaggagcagcagggccgaaggagcaatagacaggatggattgttcgaaggtgagggtgaaatcaaagcctccgcggcaccgggcatcgatcgaggggccaaaatggagatcagcagcctgtgggcagagatcccaagtatcggaagcattcagcgccatggtctatttctgatgaaataagaaccatggactgaaagaaagaagggttgaattcacgcgagaacggagagaacacagatttaggggaagtgaaacaaagagacgcgtgcttacagggtaggtggaactagtatctactactacgtctgctatttatttagtaaaaactactaattctgtcttattctttatcgacatagagtcaaaattaacaaaaggtcagtataaagctagtaaattatatatactagaatgctaacagacctttaggttttgctatattggaaaccttctcaaggtcattgtcggcccgttgtcatcgcctctactatacagtgtactgcctcacgagaccatgccactaccgtgcagtccgagccaatagccatcgttggggctgtagatcccccgggcagagcaaatcgacgtcaaagctctgggagctaaggagtccgacgggaacagtttttagcttctaccgatattaaggcaccgcgttcgccattcctaccatgttttgacgcgcaacttgtcggaataaaacctactgaagctaattgtattggccctcagtatcgtctacgccttgaggccgtctagaatcggttaactccgttggttgacggctgagacagcggtctatgttgggttgatgtggggggaatatgatcggccgggacctagactccttccctatgtagtacttccggaagcatcgaagcatctcgaaccgtctcttatttctttgactggcatggttgtagacttagccgacatctatcatctatgactaatttcttagcagttcaaaaactaagggcagaaaaggtcatatgatggttatgtcattgatgggaatagttaccagatcagaatatatattcaactaggccaaattgaactggtgtgtagatagggaaatagtcggtttgggggtgtacagtagttctcttctaatttacatcttagagccctccaactcctccaagcggtgcatatccatatccttctccaacagaggaatgacgtaggggtcgaaagtcttccagtaagggttgttgaggtggtactgctgcgacgattcctgggcgtagcgctcgacgatggtgaaatcctgcttgtcgaagacggactgcgacacaaaccaggagagggtttccttgtcgttcgagtagacgttggaagcttcaacgagcttggccttgagcttggagatggactcttcgtccggcttggcacggaggtctacgactgtcagcgttgggaatagcaagacgaggggtatcacatacggacgacgattgtgtaaaccatgattgtttagaggtgaatgatagagggattgaggggcaatggacttggaggggaataactacttttacgaatttagtcatcggtgaattatgcagaatggaaatctccgaaatttacccggccgggtcttgatgtcttgataagcttatttccattccagtatctccaccaagctccaacgatcatgaggtatttcttggacagaaagaatcctaaggagacatgcccagtttcaattctcagtcctgtgagccaacctagcaagcaggctcatcacctgcgttgccaaatccggacacttaagatcggatgtcgtcacgagcctcactgccaggaaccaccttgctaaccatagcgtccgcgacacactgcatccactggtagggctcatcggcacgaagacggctggagaacgagcccttggccttcatagcgagaatggtagtcacaaactgcaccaaacgcgagacgtagctcgaattgagtctctccgcgccggtgagatcaatgatgacctcctgcacattgtgtcccgccgggatagcgcgacaagcagccctccaatccaagttgagggtgatgaactccaagccctcggggtgggtcacgtagtcgatgaagacgccgtccatgctcgggtacgggaacggcagtgccatgaagaactcgcggacctcggtcggcttgttgcgagacaggcggcagtatccgtcgccggacaggccgcggaggctcggctcggggaatcgtctgccgatgaaccggtgcaggggggcgaggcggagcttggtcgcggttgcgttcggtgcggtgctggcgaggtagacctcgaataccttggggtcttcgaagacgaaggttgggctcgtgacataggcagggagctcggtgagccgcactgacatgcgcagggtggaggcgccgatcgggctggccacgaggtcgccgttgatgagggagatcagcagctcggtgttcaccgtgaggatcttcatcccgttggcgagttggtcaatgttcattgtggcggttgctatttgaaggaaagtgatttgggaacttggtttagggaactggttgatggaatgaaggaaggactaatgtaatgcgacaggtcgtgtgaaatttatggcgatgtgaatgtgtgacgacgtaagcgtttgatgcgttgtgaacgtttgatctgatgtatacgttgtcgcgatgtctactgtaggtgcacttcctgaagagtctttccaatttgcgaaagagcgaacaaatatgaatagcgatctacctgacttcattagatgttaatgacattctattccccttgcaatatcccaacctcaggaacttccaagctgaccatctgacacccagtgagaaccaccagcacatcggtaaccaccgctttgtttaagccatttaaagccagcaacacagactcccatagacctcagcttcatctgattagcttgttccttgcggcgagcctcggccaaagcctcttgctgcttgcggagtttctccaagatctcttcctgcctcctgcgttccatctcaagcttgagtcgggcttgttcgaggagtcttttggcatcttcgtctgcttttcttttggcctcttccagctcccgcgcggccttttcctcctccgccttcaattttaatatctcctgcttctgcttctcatattcctctttcaaacgcaagtactctttctctttggcttctgctagagccttgtccttttcgagttgatgccatacttcatctgtaacatcggcatctcgctttgcagtggcagtggaattctctgtcttgggctctgtcatgtctggttccttggaggcctcattctcgatgaccgagctttgattgtccagcttggtgacaggcttactcaaaggttgagtgcgtacagccaggtctgtttgctctgccgcttggatcgcagttgatagaccgttttgcggatagacttcccggctggaccgctcattgatcattgagtcgagggcttcgagcaccgtgtcttcgctcagcaccagcttcttcccactagatgacagaagagtttcgcgaaagattgtcttcgtaagcgttccgacgtctcgtgcatttgcccagcctgcagatttcgcaagtctgtcaaagcgctgcgacattcccttcataaagtcaaaatctggaccctccaagcagactagatcgaactgagcctgtgatttgttgaggaggtctcttttttctttcaacaagagctcgtaaactaagttgacacagtctgctgaggacaatgggtcgaattgaagagactctgggaagcgactggtgagccccagattgattgacatgagacggttgatgtctccatcataaccggccagaatgatgatcagcttttgagcaaacttgggcttggtaatggcatccacaatctcatccatggcctctttggcgaaatgtccctcagcgagccgataggcttcgtcaatgaacaagacctttccaaggccacgttcgaggacttgcagagtcttcgggcctgtctggcctatatattgacccaccaagtccgtggctgaggtttcgaccacttcattcgaagctaacaagcccatgtcatagtagacttgccccatctttctagctgtgctcgtttttccggtacctaggatttaaatgtcagcaatattcggcggacaaatactgaacggagaggtgtatacctggaggaccacggaaaacaaagttaaacggcaactgcgtgcgcggatccaagtccagtcgtctaaggctctgaaccatttgccgatagccttctagtttggcaacgatactttcacatcctatgacgccttcgaacatctttgcaacactttccttcttatctgcacgatcaaagtcttcgtcaaagtcagaagcatcaagcacagaatccggaatagaaccggggtgtttgatggacgagaggcgcttttgataccgcatcttggcggcgttgagcagattatcaatcttgcctgcatttccaaaaggcggtcgattccgagcacgctcgagcatctccaataccacacagcggccacgatcatttattccaaacccttgttctttgagcttgaggtccaaaatcgcatccagctcactcgaggtgaagtcctcgaagacaaatgcctggtcaattggaaaacgtcgggtgaggccagggttgaccttttgaaacatctcttccataagatccttgtaacctagaagcaagacgcacctatcgtcaccaggtgtgctttgcacttctgccacgatggtgtctatcacggcagctcggtatgagtcactgttggaacctgtcccatccgaggtacctccagagaacagtccataggcctcgtcgatgactagaacctttcccaatgtagatgcaagtatccctttggtgttcttttcggactctccaatcacactgccaacgaagtctgacgggttctttaccaccactacgattgtcagtaaactttatagacagcggaggagcccacataccttcgccattggacaaaaacccgatatccacaagtatctgaccgtagatctttgcgatagaagttttccccgttccgggatttcccaagaaaactttgttgagactgtactcaaccaggggcttctcatccagctcacgctggtagttgtatcgcatggtgtctagtatggcctccaccgtcttcttcacagagtccaaaccaatcatagtctgcagcttttgccaagcattggatgatttcaaagcctgcgatggatctggcccgatcatgtcttccttgctcagaaagagattatcaaccttgctcgcagcctgtcgtgtttcccggctgagacgtacagcctgtcgttcagaaatcttggccatggcattctcaacggctcgtgcattggcgaatccctcacgaccacgtccgctcccaacccgacgagctacaatgcgacaataaagtccgccaaggttatcctcgaccttcatctgctttttgtatttcttttcgatgcacccgaccaaaatctgcatcaactcggcgtcgtcgaaatcatcaaacttgagctcatttgggaaacgactaggaagcccggaattgtatgcgaagaacttctccatcggtcgttgatatcccgcaagaatgaagaccacttttccggtgaggttttcaatctcagctaagaggaagtccagaacttgggggccgccgaaactgctgccgacgagctgatacgcttcatcaatgaagatggccccgccgccgtctttcaagaggttttcgatgattttttgacatcccgagacaccatcgttcgcgagtctagacccggttgtctcgatgaatttgtcgccgggaatgatccccatggacgataggaacttcgcgtatagacgcgcaacggttgttttcccgctaccgggattcccgagcaatacagatccgaatcgatcgtggctcatatcaatgttctgtctaattgcgacgtccactttagctttgatcgacaaaaactttgtcttcactgattcaagtccgatcatgtcgattaacttgtcgatctcctggctttgagcgttgaggaacttcttttgatacttccagtctgcttgagccgcggacatcttttgtgatggcatgacttgtcgacttggaggctgcacactacggctttgagtgcctgtggcactggattctgagcttgcttccgtgatggttgcgggcgtgctaggaatggccccagagctcaatttccgctgaggcgatacagggcgcggaggattcttcaaatcctcaatttcctggcggtactgttcaaggaccttcgctcgctccatatcatcgaattcatcgcgtcgcacacgcttgagatgagaagcctcctcctgagcctctgcaagcttccgggcgtactcgctctgctttctttgccgttctatctctagtctgatatcgcgtttgcgcttgcgctcttttacctgatcttcttggatgcagaaacgacatgaacccttggcctgggaacaggacagagacaaggaatgaccgcgggaacacttccatttaactatttttgtgcacttcatttttgagtggtccagaagctggtgacattttgaggggcactcgtgtactccgcaactcagtttcacgccgctatgggaaagtcagtattaagatatcagcaaaagttctggtaaacctaccaaggggcagagcatcctccgtctgggcattctctatcgaagtcctccgctgttcggagaatcgaatttgtctgcggatgctgttcgcattggacgggcagtccatcgtatagatgcccctctgacttcagttggtcgattagcggcttccagtgcttttggcccttccgactagaaacgaatgtttccgagtttccaaccataatgaggacatttcgggctcgggaaaggaggacgttgaggcgctcgggagctgccatgaatcctatgtcgccaacttgattgctgcgggtgagtgacgctatgactatctcactctcttctccttggaagttgtctattttctcaggtcagactttgcttgcacctaatttcttctccatacttaccaattgtagacagcttgattggacgcttcgaatgggaggcaccagcctgcgacagaagacctgctttgacaaggttgtgggagtcgaggtcattcagaactgggtcgttctgtttgcttagagtctgtctcagtagactaagctgacccaaatatggagtcaacacgaccagcttgtctgttccatacccctgctgtccgagatacttcacgatcttgaggacgatctctgcctcgaatacattgctcttacttccctttgagttctcgtcgtcccggtcagagacctggacaaaaatgtcttccggattttgatgatggaaaaatatcactctgtcgcacagacctcgtggctgaggacgattcttggtctttttatcgtcttccagcccaggataggtgaggttgcgcacaagacttgagatctcgggacacattctatgttgcttggccagtgtcgtatgtggaaatccgacatgtatgagtctttcgaaaagggagacgttcaggtcatagccatcgcctttctctgtgctcaagctgtagctgttgatttttggccgtagctgctgatgatctcctatcaagatcaaatgcttggtctccggtgtcattgcggtgagcacatgcgactcaaggatctcacccgcttcttcaagaagcacgatgccaggggaagcatgtcgaatgtcctcggaatacattgccgccgctgtagtggtgcagccgatgattcgctttgatttcaagatttcccggtttttctcacccagggtagcgctcagttggctttggcttttgttgaacaatgctatgctaacgcccaaagactccgcctgttcactcagcagagctttcttccaagagctgtttttctcctcccgtattttctgatcgagtgcccagatgtcgtgacaatgagcgggaagaagatcagaacatacccctgcatcctggttgcggatccatcggtgataaaggtagtcttttcgaattgcttttccactattatcgaccacggccatgctgtttggttcctccggctccggtacggtcagagctgcaaagtattctggttcttcaaactccagatagtccaagatagatgtagcattagctgtgagattcttgtaggcttggaaggagtcattcaaattgtccttttgttcatttgcgaccgcttcgagtgaatgaattgtgttccaggtggtttgatccctacggtaggacgagtgctgcttaaacaacccaagcggctcggttcgttgtgaagacttggacccgagtctgacgatagtagagggattgataccaacgtctagtaagtcttccaagaactgatccaaggcatgatttgtgtagcacataaccaggattttgtctttcgaattatcgtgcagggcctttgcgagaagagcacctatgaacgacttgccggtacctagagctcatactgtcagtttaatgtcctcggttatagaaatgagaagatcatgagaggatactaagatgatagtgggaggataatgagacgatccacatgatcttacctgggggaccttgaataagactcactctctgtgtcaacccagccaacagagaatctaactgtgaagagtccaatgtcactgacatcgaggttttcagggtgcgctggatattacatccgcgttcttcctccagcatgttgaccaaattccgaggaactaggcttgaatcctgcaccggctggcctttttcgtaaaggaacaactcctctgtgagaggcaactcaatcctctcctgcaagcccttcaaaattggctcgtatgcaaacattgctgtgtcaacaagcaggaattccacgtcattgtagagtttcaggtaaagtaatgactttttaagggcctcttcacctgtaatacgcagcataacaactggcattttgaataacagttcatcaatttctcgttcgattgtggcaaaagccacgatatctgtgtccctaaccaagcaaccaaaagcacgatgcttcacaaactgaggcgtgctgtttaagaaggctttgcgagcatcctctgagaggttcttgagcttttcaaggccatattgggcagtcacgccgatcgtacatggtcggaggtagtttggggttctagcagtgcagcggacatgagaaagattgagatttctcaagtggaaagccgagcgtcgccccttctttgtgcctgttgcaatttgcaagtcttcgcggagctccgagagcatatcttctcgcaaaaggcgaaactgattgtcaacatggccggcaatgcgttggccactggacagctgtgcgatgtcttcagcacggcgataaaagggtttctccgtacatcccatctcatcggccgtgggaaggatggccgtcaagcgaaaatcagcaaaatcattatcgtgccgaccacctgcagtgatctcagagtcttcgacggtggttgcatgtgatttcatctccagaagatatctaatcttgtggcccaagtttcgtatgtcaactgagggggaagagaaaagcgacccatccttcaaaacagtctgagcatcagctctaacgtccaccctacaagagggaggcaacgaaagcaactccgccatcaaccagcatagagtgtgggtcgcatgatcctccagtttgcgagtacggaacgcctccagaaatgcaccccagagggtgcgcggctccaagataatcagaagaagctgctcgagaaattggccgttgcagaggagcttgacttcgcggtggttcaggtattgaataaacttcgcggtgtacccgttgatgaaggtcggggttaggttaaacctcagtccatttcgcaaggcattcagagcgctttggcttgagatgattcgctgaacgacaatgctggggtcaccctggtccaaggttgcttcgataaatcgcttgaaactgttctgatcctggacttcgtgctttccctggacaacctctttgaaatatttggccagtcgctccgatcgaatattttgagacatgatagcgaatgagacttaacatagattgcaagatcaaagtggcagagacagatagaataaaaggtgtagaaagatatcagagtcgagagataagaaacagtttagattctgcattgccaacaaagcagagcacagtgagactaatgcagatgcagtctgccttgtaggcttttagctgataatgcgcagttgggctatgcgcagcaaaacccaacaaacgcaagaatgcgcaggaatagaccaatgcatgaagcacagtatgtgacgtggcgacaggggtctatgcccccgcagcataacgtgagacaacaaacaaaaagtacctaaggctttttttgtatctgtcgttgattgttcttctgcctacatacacatacttcgtcgtgctgcttcctgaccatcagagtctaccacgatgtctccacaaggaagaggaagaggaagaggacgaggacgaggacgaggacgaggacaatggagaggaagagggggagtatatgcagcccagaccagttcaccagcacctccgctaggagatatcattgtcacaatctaccacaatgaaatcgagagtccggcacctgatcaagatgaagacatatctcgaatcacgaacagtcaatatctgacatcctacaactggcttggtgggaagaagagaaagataatcgttccaggtaagaggataatttccgataaccaaggcactgttcattaccattgcgttaactgacatattcctaggtgaaccaccaaagtggacgcctctgtccgattctcccgcgcttccacaagacaggggtgattattaccgtgatcgaaatgccgcacgataccccacctatcctctggagccaatggtacaagcaatactcacagacaaccccgagttccccattaccagtgtggacatcattgggtgcaacagtacaatggggaacctgcgacgctttgcatctgggcagggtaagccctttaggatgctagttgaggtactcggcaagacagtattcttcatcagaagggaaaattcgcccactgaggtgtttcccgatattcacggttatgggcatactttcccggaagcatacaccacgtggaatgcaagtgtgggcggatccctgtcccaccaacgggtgatgaagtatgattttgccggaatgcagtgcttggtacgttttgaaggggacggctttttgcccgacctggtcctggataccgaaaccgaaggacatcctgttaccccgaaggatagtatcgacccagaagctttgctgtccatcgagaaagtgacaatttcaggttacccctctgccattacagaaatggcaccggagcagcttgacattgcaagacaaggccggcgcattccacagtgtgcagtctttgacctgaagactcgatctcacgctaaaaagggcagtgacattattgaggaagaactgccccggttgtggatttcgcggactcccaacttcattctagcccaccatacagctggtcgattcaagcatattcaggttcgcgacgtgcgggatgatgtgaagcagtgggaggagacccagcaaccggctttgggcaagtttgccagcttgctccaaatgatcgtggaattcgctcggagcgcggataacggaaaacttgagattgagcatgaagagggtgagcaagttttgaatctgagagaacaggggggagttgttcatggcgtcttgtccccggctgtcgcaagcaagtgggatatgtgaaccggctctctcgaggataattggtttaagctactactcttagtttgaagcttgctctgggatgtaaatcagttcaatacaatccaatctattcacttacaacaaccgactgtaaagccatcagtcttgccaggtgtgcgcaagtatggcatcaaggctggcattagaaagcagaagtgtcatatcttgactgttcatggtactgtttaacaattcaacttagacacagccctagacttgagggttcattgccatgcccggaatagcagagtgtgcaagtgtagtaatgagtgaatgaatatcgtatatttttcgctgaagggaatttctgcctcaatttcaagtgctgatatggagttgatggagcaactgtactagcaagttggaattgacatcattatttcggtcagaattcacgcccttgccgagagatgcgctgtcttgtcaaggttgttggagagccgataagccactattttgccacttcagaccgcccgacaaccctcaccaccgagctcctaacaacttgccgatcctactatctcaatttctctcttatttgcgtcaccgaggtttgacttccgagattctacctcaaactacgctattgaaaatcaggacagtttctgctagccaagatcttcgtctctgaacgagacccatcccgaaagggaattttcctttttcgcgcgacgacagcaaggtacttgctgcagaaaccggcaatatgcccaaatataagtagcctctggtctctatatttgcaactgaaagctaacttcccatgcactcttctgtaggttttgccgcaaatccacatctagacagtgtcatagcctattccgggcatgatgcgacacgaggctatgcgcctcattgcggccggctgagcccatccatcgacatattgctgactcctcacttcaacttctaggcgactactgtgatgtctacctgacacacgactcgatgagcgtacgcaaggcgcataactccggtcgaaaccacctgagaaacgtggtggactactaccaacgtacgtttgaccgatggcgcagcaaggcgcccaacccaacaactgaatgatagctaatcatgtgaacccatacagagatcggccaagaaaaggcccagtccgtcatcgactccattacctcctcctacgccgcagagggccaacaagcccccaacatgatggcccccagcgctttccctcctcccttcggattccctggtatgactatggctcttcctcccgggactccagaacaccaacccgaaaccgaaatcaagctaacgccactaggacaaccaggcatgccccctcctcccttcggtatccctccaccaggcgcccccggcgccccaggcatgctccctcgtatgtcacacccacttccacacccacccccactctggcttcccgaggaccccagccaaagatatctagcctacccaggatcataccaagctaatgactatgcctcttacccagcccacggccttcccttcccgccgcccttccctaacgccaccggaaccccgccaacaggcggcttccccccgcctctccccaacatgccccagggcgcaaacttcccgataccgccccctggtggcttcccgaacttccccatccccccgcccggcgttgctggcttcccgcctattcctggtcagcacggtatggcgccgggtggtccatcgcctattcctaccggcccccgtggcttggagggatatcctcctccccctggaggtggacctcctggtgggatggatcaacggtggtgattatgatcacgatcttggggttgattcgcacgtggattgtttctgataccttttttttcccgtgcggatcgtcggcatggcatgacatctcatgggtctttttgctctttactgttagtgtaaaatagcggtttctttttttacgtctctttactgttctgttcgtacgttctgtttcgtacaaaattgtcacttggtttctagtcgatttcgaaagacatggcgtctgaattctttacgatatacatggcactgaaacttgcaaaagaaaaacttcgacatccacatccatgtagacatcggtttcatatttacactaggattatctccagaatactggtgtataaagtgagagatgctgcccaggtgacgaccggagaaattggaatatatttcatcggcagcagacatagtgcaaagccaacaaaaagaaacgagaacccccaaggccaatcaccatacccaaatgcatcaaagaacgcccagcggaagtgaaaacaagggaaagacacggcaaaaggatttagggagagagagaaggagaaaagaagcgaggagaagaagtaaagggaaaggaagggatagatgacaaaaaaaggcgcacaaccattaagaaatggagtggattaagaaaagaagtttatctgagcgacgaggatgctgcagacggtgcgcagaagcaaaaaaagaagagaaaagaaacccgaacccagaggaatggcgaatggaaaaatcatagaccatcggtatcccgcgctaaaacaaaatcacatatcttcatctcggaagcgacaaaataagagaccaatggcattttttaatgatcatagccagcgcctcgttgccaaggactggcactgttctgggctcgatatgtcgttgacaaagcagattggccaacaggagaggtgttatcaaagctccttggcgcgggtgaaggggaccggccgtaatggtcgtatccggggggaggattgtgatgacctgacgcgttgctggggaacagtggcacggatgggtcaacgggtgaccgaggcgcttgggcggcagacccgtgcagggagtaggtcgattccattgggcggccgacggtagcaccgtttccactggagatagaagcgctatcgtcgtcgaatgggttgttattattatattgtccaggcttcatatcaccacgtgcggtagcacccaaggcatccaattcagtggtgagctgggtttgagacttgatgaacgagccacggtcgtcgcgcatgggctggtaacgagtgtctggattcttcgacacaacggcgtatatcgaggcgagcagaaccaagatcaagaggaccaaagaaaacacggcattgtaaacgaagaaaatgacacccataacaccgatcatcattccgggtgggtcgaacacatccgagaacacgagcaggaagatggagttgatgaaattgatcaccgcaatggagatgttgaaaacgttggtcttcttatccatccaaggacggagaatgcagaccgcaacaagcatgcctagctcaaggaccaccaaagccactgtttgaacgaccggtgcttcctggctcagaccgatgaacatacccttgatcaaggtgtagacgaggaacggaacgacaaagtagtatgccgttgctcggtactgcacatacaaaaaaccccacttgttcagacaggttgggtcggagtaaagaatatatgccgggttcttgtgcatggtaactgaacgctttgccaaacggatgaccttctgagaggcccaaccaagagagacgagcatggaaaggagcatgaccgctgccaaaacaatctcggccggcgagtcacgctgggtgaactcccagaggcaaaggatagacatctggggaaacccgatgagagtcaatcggaacaagataccacgcagtacgatcttccacccattgcggaagtcctggaaccggtcgctcttcattttgccatgcttgacaagtaactcagtaattcccttgaagagtgcaacgatgatgacgacaatgcaggtgaataccgcaaagaaaatcaggccagtgaggaaaatgttggtatcctccatgtccgcacggaatccaacacgatcaattcctcggatgacaagaagtttctggcttgtctcggctctcttgactataccacttcctcgcttgacaatcattggtcccacggctctcctcatgaggttcatggccgggtcaaccaaggcacgcttacggcgcctgaggacttccacagaagtatccgaaagctgtgataggactgtcgatggagttccaccggttgatcgctgataccaggtagcaatcgtctggatgaatcccacgcggatgatacccatgctccattggaagttctgggtccaagcttccacgatcgggggcatatcaacggaggtcatgccaataatcgcttgggactgcatgaatccgaaaagagagagcgcatttgccgcaacgtgggctgcggtgttggaatgccctaggccggaggtgatagcggatgcagcgagacctaacccggatataacagcagttgtccacgagactccggattgattaacggtcttgccgttggaaagtgaggcctcgacacaagcaatcttttcttcggtgtcggctgtcctgatgacaatccgcacttttgcgtcgagatcaggcacactgaaggcgataccagggatattggctgaagtgcctgctgggaggtcgagagaaagtggacccaaatccatgggtccagcggacatgggacacatacccatgccactaattttacaaggattaagggtgctctgatatgcctggtagccatatgcggtgaaggtcatctccgcaataaccttaccctcgatgtatgagacgccatcgaagccgaccacgagggagttatttcctgggtagaagatgacgctgaaatatgttgccgtgaagttgctactttccatgcacacgctgagtgcattggattcaaggagttggacggcagaggctagcggcgccagaaaggcgacgaagcaggtgagaagagatattacccgcatgttggtgtatattcgatataaggaggaggttgtgaagcactggataggttgccagtggtataccagggcgaggggaaatctgacaggtaccgtcagtggcactccagagtaccacgttgccagccgccggatgcggaaattttggtacggcggactattgttggatagccgtggggtcgacttattcctcgatgtctctttgcagacggaggctgtgctgtatgttttggcgcaaattgtcggaaagccagggttgaatccaggtgttttgcctttcactggggcatttgaatataagcggggcgtacaagtagttgtaaaggggttgatggaatcgaaagaagctgtattggtagatcaacgagagtgtatagcctgaatgagagtacggccgagtagggcgaaaaggcgaagtggtcgagagtgagtggactggcgatacacagtatggccaaaaaaaggagtaaaggagtaataggcttgaaatggtagaaagtggtttgtggtgaagataaacggtccctagattccagaagagaagaagaaaaaaaagagagacaatgagagaacgagggtgagagggaagagtccacgggttgttcactcagggacagtcgacaagggtccgtgggaacatttgaaagacattcgaggtcgtcgcccattccactggcaaggtatgtggtatggtattgtaccaccacaggggcggctatcggacagccaatcacagtgtggtattggccggtattggtgtttgagtttgtttcgtatgtctacccactggcaccccccttcatgccactttcaaggcttcctctatgtttcacttagtgtcctccccttctgccctttattgtttcactccactaacactatttatatgcatctaatcctcgattctccggtcaaagaaaccaacctcttcactttcggtatacgcgtactaacgctactgaaagcggttgatggatcgtggcggaatcaggcgggtccttggcccttggtcttattattagcagaagacaaaagtcgggataatgccaatattaagtattacactgcgccaaaggaacggttgcccccagctgtggagtgtgccgcatacagtggaccgccacgtacggactacagactacaatggtaactttcaatatcaacttaatataatgtatgttgtactctactctcctgggcattgcgtaagtatttcgtctgccttgtccctcgctaatgatgaatcaaatttagatttcagattcccaggtccacacctctatgtcgctgcctactccatacggagacggagtactttgtgaatttcttctgtcgggtggggcctcttagctgccgcttttatgagggcgcttctggattggcctgagtaactttcagtccggagagatgacttgctcgatatcacgtgattagaagtatggggaggttggtgctgatggacaatgtgtactccgtacagatgattcaagaattttgtttactatgctaaagagtcaagcagaactagcctatgaaatccgattttgattcgattgaacgcggctcatacatcaaatacataattcatttttggccgttttcaacaacctgctccgaggtggcctctcccagcgagagcaacactgccccagcttcattgcggtgcgccgagaccgcacgcctgttctcatatatggctctccatcccgggtattgcctagctggaaaggcacactatggtcgggcggggttggcaggtccggccatgtaagtcggttcggtgcgttgatatatctttccatgtccccattgcgtctcgcaacccattcattcaaaaaggtgcgggatttcgatacgtcagagtcaagttcacggttgcaagtccactccgatatactctgaaccatgtccatgtgttgatcccagtggggaatgctcgtgaagtgcgtatcgtttgtgataatctcgtatagcgtgaatacgacgccagtcccatcatcgcggctatctagcaagcgttcttttccagatacggcccagttgaagtcgaagagaagaatcttatttgtatcaggatcgataagcagattccggggtgcaatatcttgatgcatgatccctagttcgggatttaggaaatccacaagtcgggtaagctgttgtagccactcaaatcggaacggtacattcagattggttggatcggcgagagttccgcctggaatatactttgttgcgaatcctatcacccgagattccacgtcttcgagaacaacacgatcaagtggtactatattaggatgcgacggcagagccttgaggatgttgatttcgtcctaggccatccggatgtttaaaggccttgtatcacgttgaatttaaaggcaaccctctgaggagtcccagattcgtcttcataggataaaagatcaacgcctggtccaagtcgatcaatttcttcgagtttagagtaatagattgtacggcaattggaaagcagcaacgagggagcgctttaatcatcaagaagggaagttatgcaacaaataaagtgtcatcctcttttggatccattgagacttcagtaagaagcccatcatcgtggactgtaattgagcgaacttgcggtgacagatgatcggcgaattgcgccagaatgaggcactcttggttctcctctagcggtaacactttggcgctgcgtttgaccttgatcatccgtagttgatcccaatcccagatgttgcaatgggcttcggttaaggggttctctttggggccgaaatagccctgattgtcagagaggaatctttcttggggcttaatcatagcaaactaaaaaagtcaaaagctctgatttattttggctagtctccacgttggctgagtgggaaaggtaaatggattgcttaaccgcacggtacgggtgacttagtgggtgcggggacgatcaggcgcgcagtcagtgatacaacaggggcgtgctcgattttactctgagcaaaaggcggcaagagataaacactaaaatggaaggagagctaagagtcattggctgatatctttgccgaattttatgtttcttagttctagatccgggggtaagcctttccgaacactaatgaaatactagcgagagctcattaactatggagtactttgtagacattattgttcttagtctactctagggttctagagccgggaagaccgttggactctatttctaccattacaattccagagcacttccaatggtaatacacatgatatagtatacgtttctattaattttgagaagacacaagagaaaatatcatcaatagactgcagatgcatggtataaggatctacatggaaacatggaaatctactaaatagcgttcacacaattgcacagcctcgtttagcatcttcatctcggctcacacgtttcagaaataaagtaacctccatatgcatggaccattcgtgagcttggtatgattgtgtcaaatcatatccccttccccttttattacaaatttgttttattattcaacatcccctgatcaccaggaaatgatgatcagaacgatcactatttccatgtgcgcgtcataacctcttcatttcccgtataatctctgacctcaacgatgtataaaatttgtggtacaaattacaataaagggacctcgagatgccaggaccattgtacgatctagtgctagttatattttcgacgcgcttaaactatgggtggtctagctagaagttgtatagctggcttgcctacctttctaggtgtgaactaaacagaaacttcccataaggtaaacactgttagcacattgatctaacctaactaggataagcttaaagtattttgtatttttggctccaccgacattatctgattcgtggttgaatcattgaatatcattggccagaaatctctgccttggctgcaattggatttcgttcaaggtatggagcactgaggttatatatcactttgtttgtaattttatacttgtcttcagtctgaagcttcaatttgtagggagcaagaatactccatcatgagtggcttggtggtgtttttgagatatttctttgcccagccttcctcgaggtttctgggtacggagtatatatccctaaatgtcttccgctagttagtggtttagctaacactactactctgtagttaacttctagactgtcaagctagctaatggctcctatcggctcttcaggaatagaaacccggcttggctggtacctacaacaggtcttaaagtcagaattcatgcataaccacagagactctgtcggagcaaggatatcgaagaccattgcccctagacaaagacaaagcagcccagcccttggaataagacaaaaactgagcaggcactaacacatttcatacaacatacatagtcacagtaatatctcagttgcctaacttgaggccaacgtagccttgcccagccttgcacagccttcagactaacatcccgtccttgttccactaaggggaacccaccaggtgcgtatactgctcggcatcatttcatctcgggtgtaaaaaatgcctgatcattttcaaaatacgggagccttaaacttgaaacacatgtgatctttgtggtcttgaagtgtcacatccaggcaaggaacaatgccacaggagatggccaacctcgtgcccaaggtaggtgccttcgtaagcaggtcaataatatcagcctcattgttcaggcaccaactgatcgagtctatcaacacgtgatgtggagttctgccatattctaccgatcagaaaaaaaaaagtagcagaatgatttccgcccgcaaagatcaataatctagacctccaaaacacaaggtccaggttatacgagacaatccctgattgatttgttcccgtgtcaaatattacactgtcgcaggaccaatcaacaaaatgcctggccccgtggacaccgcgaagtccatcaacaagcgcaagagaaagcacggctcgaaagcagagagcgatgccgccaagcccgtggaagccaaatccagcccttcagtgaccccgaaaaagagtgttgcttcgaccccgaaggcttcggctgagaaaactaccaagaagcgcaaggtcagcccttcaccaagtgccgaggaagagagcgccgaggaagagagcgccgaggaagagagcgccgaggaagagagcgccgaggaagagagcgacgacgccgaggccgctgaagatgtcgaggtagatgcggaggaggagagtgatgctgaagactcggaggctgcgaatggtacagatcttccgactttggaagatgtccgcttgccccagaccgagggcaagctgcagaagttcactgagctcaacctttccgagaaaaccatgcagggtatcaacgacatgggcttcacaaccatgactgagattcaacagcgtaccattcctcctttgcttgccggacgcgatgtgctcggtgctgcaaagactggttctggaaagactttggccttcctgctccccgcgattgagatgctgcacgccctgcgcttcaagcccagaaacggtgagttttccccacacatttatctgatatttactttccattgagactggtggctaacctttgatgcaggtactggtgttctcgtcgtgtcccctacccgcgaattggcactgcagatcttcggtgtcgcccgtgaactcatggcccaccactcgcagacatacggtattgttattggaggtgccaaccgtcgcgctgaggccgagaagctgatgaagggtgtcaacttgcttattgcgacacccggtcgtttgctggatcacctccagaacacccaaggattcatcttcaagaacctgaagaccttggtcattgacgaggctgaccgaattctcgaagtcggcttcgaagatgagatgcgccaggttgttaggattctgcctaaagaagaacgtcagactatgcttttctccgccacacagaccaccaaggtcgaggatctggcccggatatctctacgccccggaccgctttacattaacgtcgaccacagcaaggagcacagcacggtggcgggtttggaacaaggctacgtagtgtgtgaggcagacaagcgtttcttgcttctcttctcattcctcaagcgtaacctcaagaagaagattattgtcttcttctcgagctgcaattgcgtcaagtaccatgccgagcttttgaactacatcgatctccccgttctggagctgcacggaaagcagaagcagcagaagcggaccaatactttcttcgagttctgcaatgccaagcaaggtaccttgatttgtactgatgttgctgctcgtggcctggatgtacgttccctaaccccattaccacgttgattccataattgactcaaattccagatccctgctgtcgattggattatccagtttgaccctcctgatgatccccgtgactacattcatcgtgtcggacgtaccgcccgtggtgccgaaggcaagggtcgcagtctgatgttcctccagccttccgaggttggtttcttgaagcacctcaaggacgcgcgtgtgcctgtcgtggagttcgagttcccggcctccaagattgtcaatgtgcagtctcagctagagaagctcatcggccagaactactacctcaacaaggtaagctatcttcccttattacttatgtgttaccttatactaacccacttgtgcagtctgccaaggatggttaccgttcttatctccaagcatacgcctcgcactctcttcgcaccgtgttcgacgtcaacaagcttgacctcgtcaaggttgccaagggcttcggattcaatgccccacctcgcattgacatccagctgggcgccagtctcagccgcgataagaagcaggagcaacaaggacgccgcacgtacggcagtcagcctaagcacggtgctggactgaagttcaagcggaagcacaatgactgagaacaatctgtatgaacatcaaaagcgatcgattgtctctgcatatttattttagggacattggagttcagcaatgtggatatatctatttgggtttcaattttgtccccttattctgtaatcatgagagatggcatccgagttaaatattcggtgggatagtcgaatgtatcttgcttatatggataactctcttctttgcacctccttgcgccttgtaccatggtttgtccataccgttacacggtaagcatatgctcagcctagaggtctgcccgatatatgtttggtcatctacatcgccgcaaatcgtacaacatctaactatataatgatcgtaaagcttattccttgtcacggaatgccacagccagcattcattgagccatgtgggattcaaccttttcccacgtggaaaggatttgacttcaaacaagaagaggagagctacagaaaaggtatgtgcaatgcaaatctctatactaaaggatccttactgaagtactccgtacatattggtacctacatgtagtgagttactcaaccccccatacccaccgaagcgatccaattggaagatgccaattctattgtggacaagcgatcgttgccaatgacaaagtcaagcagctcgattgccactaatgtacgagatgcagcaagtgctcaacctccagctgcgccagtagtctggatgtgaattgcttggacccccttgcaagcgctactatagttctgtccagtcagaggtgagatcacggatagttagttatgttgtaatgcatctggggccaaaagttgggaaatattgccggtgtattattgtgtatctgtgcgattgataggccaatcatttcattgattccaccaattccaattatcccaacatggagaagtcggcaaggtggaagcccgagcacacgagtgtgatgagttggcagacgctgagcccaatcacccgatcttgtccagggtctctgtcgtctgggcgacggtgtgtgcctatttcggtgttttttcgccttgtcttttgcgggtccacggagaactgcaggtggaccgtgtgtgatcgtgtgtgacgaggacaccaaagcgtttcgccgggtttgtgatggggtgtttgggagggaaagttgggttggggttggtctagagggctggagatgcccaattcgcccagccacgacgtcctcagatgttgagtatacagagcagggcctggaggtgaataaaataaataaagtaattgaagaaccaaggaaccaaagacgatcccgaacggattccagggttccgtttgtttacaacgtccctatcttcgtcggtcacgggtacacaggtagcggtcgggtactctttgtatggtggcccacgcggctcggaacctgcgatgtacaatcgccaacacatccagcctcttcatttttcgtttttttttttctatgaggctgggcatcttaattactcgggtaccggctgatattcgcctgacttatcctttgcttcatctttcattcctagcgattctgaattcctttccccttttcctctctcgcattttcatgtgagggatcggcgagcttcgacagcaacacttcttgggcaccctcaccgttgcttcctctctctccttcctaattctccccattcttaattcttccccactgttccgtggtctgcgctggtacgctctcaactcctatcaaaataattctcgggttctcttcttgggttcctgtaatttgtccttccccactatcgtgccaacaagcacggagcaacagtgatcaccctgacaacactcccctccatcaccctcggtcgagcacgacggagcatgcgattgggttgaaggacgcctcaccaccatgggggtcaacacccgcaaaccgatccttcccgcccccacagaatccatcatcgataccacgggggacagcgcaacaggcacagatctggcaactgacctttctcgccgcacagacaaaacgtcgtactccatcccagacgacggtagccccgtcactgtctccactcggcggcagcgggaacgcgaggaaaaattgtctcgagctcaacaggactctcacacctcattactcatcgagtatttcgagggcggcaaaggttcaagcggcattgtctctcgtcctagtgtgcgagtgcgtgtgaccccatcgtcagctagaaagtccagagataagaaagaccactttcaaatcaccgaatcaagccgaagccacagccgcaaaccgtcatatacccaccggatatccctaccatcagcatccgcaaagcagaagcaattggaatcggaagcggatgaccagagctttagttcgaattcagccgaggaagaggctcattattcgtcacgtcgcgatccggtagatatcgaaattgtgaaccgcggacagggtagcgagatgtcttccatctcgcaagataatcgatacatgaccaacgcctcagaggtttcgtccatgccaccggacagcatgatcaacgcgtcgtcggctggtcccaggcggaaacgcagccagagtatggagcgtgatgccgacgaagataagggattgctcaagacccctcaccgacaaagaagtcgcagtttaagtcatgagcgaattgcgcatcgcgtggcagaaaagctcaccgagtcaccgcaagaggcttcgagcggcagacacagaagcaagggcggcaaggattacctcgaagccgaaacaaaaccatcccgtcgccgaacgcgcaagtatgcggaagaggatgtcaccagtcctgactctagtattctcagcacatcgggagtctcttcaaaccgcaagtccgatcagtactcagttcgctccggtgcatccaaatcctctatcaacaatccaaagttactcgagacggttgaagatgcgatcagaagattaattctaccggagctaaaggaactcaagaaggaccaaaaagtaatgaccaacaagaacaaattcgatcgggacgtggctacatctcattcgtctggcacgagctccagagatgagctaggtcgacgtctctccaagcacgccagtgcgccggatgttatgccccaagttgttctgaacaagaatagcaaagacgaaggcattgttctttctcccgaggcggccccacgcagtaaagaggtcaaggaagtgaaggaggtcaaggagcgtaaaccaagcaaaagcagcgaaagctccgaactggcgatgagatgggccaatcgacccgacttcaccgaacaagacaagatccgcaggcagaagagcaagggtctccgcgacgcccatgctgctgcccgagttgggtctgctcttacggcagcttctttgaaacaccacgattcgaactctagtctcggcagaaatgatcgccgccgagatagtggctctcggaaaagttcacgcaagagtaccgagagtatgaactataacgaaaccgagcttgttttccagaagcacaatgttgcgccaatgccaatgcgcagcgagatggactccgagttgaccagaaactcgctactctcggagcgaacggcaagtcccactcccgaaaaacaaacctcttatttcgacactactcgcggatcgccgaggcaggccatgtcgccagcttctcgcactcctactagaaattctgccgactcgcgttatgggctcggaatgcgccatggcaatcagtcgcaacataatatttcggtgcacagtgcttcggagcgcgaccttcatcaccagagccaatcccctggaaccgatggtggtaaccgggcaattgcagctgcagccgcagctaatctccttgatgctgctcaccccggacatcatgaaacggaagatgactatcacaatgggaccaacagccgcggactgagccccattcagagtcttgcaagtgatcatactggaattcgccacgatcattactcgactcacagtgatcagcatgtcgacggcaaacatgagatggagcctcgactctccatagactctctgtcatccgcccccagtacaaacctcgcgagatccactcgtcagggcactagctcacacagccagagtgcaatctttaagcagcacagccaggaatcacctgggctcggatacgaacattcgcgccagggctcccaagacgatggcttctatggctatgacgaggagagcagacgctctcacgacgatggggatagcgatgttgacttcatggagaaagtcaaagaaggccaccgtgtgactaccggtgctgctgccaatccccaatttatgcacccgatgcccgtcgaatctgcagtcgcttccttgatggatccatctgtccttgattctcatgtctcatcgaaccgctcgcaaacagatctaagtcaacgaccaggcaaccgaagccctgaaaagccaggaagcgaagtttatcgcggaagtcctttgaagcaacgccaggatgctttcactgccgatgagacctcgttcccccgacgcatgggtgccacatcgccccctcagagcgttacccagtctttggacgatatcgacgactctgctatgatggatgccaatgtcccacatgaaaagcaaagtcctcacacggatgctgaaagccaagtctcagagtctgaaatcaacaccaacccgtccattatacagggccccattggtggtgtcgctcaggcagaaaactggggatatgattcaagatctccgccaccggatcactactacgatacccagatcggcggatctaagggtctcaatgccgagcagcagataggacttgatgcggaatactaccagactgcccagaatatctttggcggtgatgactactctgcccactctggcgacaaccaggcccggcaatcgtttggtacccctcctggtgccaaggacgaaggctacgtttcggctgccaaccctatgtctcctagcatcgggaccccgaagcaagctagtcgaggtcttgccggcgcggatgccgctggaatgggtagtttcgatagttctgccggggcagacgatccttttgcctctggtaatgagcgccacttcagtggctactctcacggtgttggctccccactctacgacagtgctaccggccgaggcattgagagaattcagtcccaggacattgtggctcttatggatcatttgactgttcgagacgcccagcggaatgccagagataccgagattctgattactttggtccgaagtgctgctgagatgcgcacttcctttgagcagatgaggagattcatcgccgaccaagatgatctcatcatggacgtgagtgacaggggacatgagcggactcacagggcgcttggtggtccgcgaccattaccccccagtggttctcggactcggcagctgaacgctgaagaggaagataagcggaagaacatcttcaagcgtgcgctcaagggattgagtctcaagtcgggcagtgatttgaccaagattgagggcatgctcgagcacctgcttgacgaggttgaggccctgcgatccggacaagatggcctaagccctcacggtggtaccagaatgggaagcatagagccaaatgggtacgagactcctggtccgaatggtgtacctactgagacgagccgctcgccctacgggtccggctcttctcgtccagccaatgcgcagcgcagaaattcggaccagcgagtcagcaccgtccatgaagttgacgaagaccttgagcttgacgagggtgaccagtttctgacttcacatctccctgtccgcgatgcgccccatcatgagcggtcgggttcattgccgcttgacacgcccccacgcaagccagtaaccacgtcagctcgtagcaccgagacaacccccaaggctcgcaagcacaagtccagcagctcgtccattttcccgaagatctcgcgctggtctaagtccacggcgacctccatgggcgacggtattcgcaacagcatccagccttcccgcaaagagcgtccgacctcggatgagtctcggtctggatctgatctcgcaccccagggagcgtatcatgatccccaaggggatgacagaatccgatccaattataccttgaacgaagagcaagatgagaacagacctccttcaccgctagtgccttcccaggtgtctgaggcgcccaaataccgcggccaccgtggaagtctcgagctgcagcacccccagcctcggcaaggcccaaccgcccgttaccagtcccgcctcgaaaccgaggcccaggtctacggaggcccggtttctcccactggctcagaacagtgggattccaaccccagcctggtcaacccttcccagaaccgcaacagcggtgccgcgcgcctgtccccgatctccgacgcaggctactcggagaccagctcccaagcaacccgtacaccaggtccaccccgtcctcctaaaatcctcgattcgggtcctctcattcccgagcgtcaacccaaagcgacggataacgaggaaccagcttacagcggtgaccgtgttgtttctagagtatgtattcccaaggatccccgctaccgtttcagttgaacaagttctaatctccactcttcagagctctgccgtctgctcaccccccactcgcaagccaactggcccgcgtccccttgcatctgccggctcctacagcccaggcaatatcaagcgaacccgctaccgaggcagtcccgtgcaaatcgactatgacgatgagtagtattgagacttgcattgtgatacccctgggttgatgttttcaatctccatttccatctagcgcttttgccttttcttcttgctctttccttacgacagttatgaccgttccctgggactccggtttcagttccgttaaccctaaatctatgagcaatgtgtgtgcatgtttaaatgtctacaatatttcctgcctttatgttttatgtcaatggccatgagatgagcgggaagttatgtcttctcttcgcctctctgactttttccactctaagtttctctgcttatttttcatgctcttgcttccggcatgcagctactctcgcgcgtctactaagcgtgaagcctattctttgtagcttttgtgttgtggtgtagatagtggtgcagaagaagacagaatatattacaagttcgaggtgtggaattatctttcggttcttttgtacctttctgttgatgccaagggatatgaatgccaaaggttggttctgtatatgctcgctagtgtagtttcgagcgattctcttctaataatcaattcgtaatttgcatctcttcttcgtcttggaggatgtctctggcgtatctccttacgcattatgcataagccaaattgaggtctggtcacgggccgtgccggtgtgtagatcaaggggccaccttccgtcactcatctatcgttatctcgacattcccatccatatttcgacataaatccaacgctctataagaaaaactggcgttatctcagagatgctctcgtcttttcttaagtccttgccccggctcggaagaagatggacacctctcaacttcaccaatcagaatttcactcggataccaacgagccatgcaatcgaggaggaaactatcccaggctatgttgctggtcggtattatcctactcgaatgggggaaatactcaaggaccgataccaagttgtggggaagctggggtttggagtcagctcaaccgtgtggctcgcacgtgatatagagtaagacgacgatacctttacaactccttcactcactgaaaatatagctatcgtcgctatgtcactcttaagattttcataaagtccacaacgatgggccagcaattggatgacgagctgaagatatacaaacgtatcgaaagcgctccccggaatcacgcaggtcgcaagtatgttagatctctgctggactcctttgatatcagtggacctgaagacaaacatcgatgtctcgtgcatcccccgttgtgggagagtatgttggatttcctgttccgcaacccggtgcagagactaccaacaccgatcttggcagtgacgcttcatcgtctatttcttgcattagactatttgcatacagaatgcaagatcatccatactggtgcaattttctttccccagtcttgagatcgatcatttgcttatcaatatatcagatatcaaagcagataacattatgttcggcattgctgatgattccgttttcagagattttgaaaacgatgagcttcaagatccttgtcctaggaaggagttagatggaaggacaatctatacctccagcgtgcttagaacgcctaaagacgtaggcgcgcctgtcctctgcgatttcggctcggctgtgatgggcgacgaacagcacaccgaagacattcagccggatatatatcgagcaccggaagtgatcttgcaagttccatggtcatatagtgtcgatgtatggaacgtgggatgtgtggtaagaaagcctatacttctgatgcaaaaaaagtgaagttttaggcttacgttgtcagatttggaaccttttcgaagggggatcgctgtttagcggccaggacccagagttcaagacttataggagtcgagctcatcttgccgaaatgatacgcctgctcggtccgccaccgccaaacttccttgcccgggggaatcacacgaaaaagttcttttcagaggaaggtaattcatctatctgtcattttcctacctatgactagaaagtgtcaattattgactgtttctgctattctaggtgactttctcattggaaaattagtaggagaacacgtaccaatcgagcaaagggagactagtctcgagggagaggaaaaagagatgtttcttcgcctagtgcggaaaatgctacaatgggagcccgaaaagcgaagctctgccgcggaactcgaacaggacgagtgggtgcaaacagaattacgtaaataactgcatgtccttcagagtgtactataagaaccacacagagtgcgaagcgcatgcgaatacaccgatatccccactcctgctcatacatggagaagtctcccctttaagccgtgacgcgtctaggcagtcttttagggcattagcggacctgcagcggcgatccatctgcattattacgacaattccgacatccgattccgaacaacgatttcccttgaataaaaatagagaatgagcggtttgagttccaaggattttgttcggcgtctcggtatctcggggctcggagtgggtccgccatccgaagtatgcagtatcccgagaaatctcatggatcggcttgtgtcactcaaatttgatgtgtggcgatccgaagctgccgccgtgaagactcctaaaggaatatttaagctggataaattgccaagggctgccctggttcaactgcacttatcacatacacaatctccatccacgaagacatattcacaatggccagcattgaacctcacctctgcttccggtcatttgtcgaagccttgaaggccgacaatgatctggttgagatcgacactccaatcgaccccaacctcgaagcagccgctatcactcgtcttgtctgtgaaacgaacgacaaggccccgctcttcaacaacataattggtactgagaagggtcttttccgcatcctaggtgcccctgcatctctgagaaattcctcaaaggatcgctatggtcgacttgcacgacacttggccttgccaccgaccgcatctatgcgcgacatcctcgacaagatgctctcggctggcaccccgatcccacccaacatcgtgtctaccggtccttgcaaagagaacttcctcgaagaaagccagattgatctgaccaagctgcctgcgcctctgattcaccaggctgatggaggaaagtacatccagacgtacggaatgcacattgttcagtcccccgatggatcctggactaactggtctattgcccgtgctatggtctccgacgataagcacctgaccggtttagtcattgagcctcagcacctctggcagatccaccagatgtggaagaaggaaggccgcgacgccccttgggctctggcatttggtgttccccctgccgccatcatggcctcgagcatgcccatcccggatggtgtgtccgaggcgggatatgtcggctccatgactggatccgccttggatctggtaaagtgcgatactaacgatctctacgtgcctgccacctctgagattgtcttcgagggtaccctttctatcacggacaagggtcccgagggtccttttggtgagatgcacggctatgtcttccctggagatgtccacctgtgtcccaagtacaaggtcaaccgcattacctaccgcaacgatcccattatgcccatgtcatcttgcggtcgactgaccgatgagactgtaagccatccatctccatatttccggatccctactaatagtattagcataccatgatcggatcactggccgctgccgtgatccgcaagatctgccaacaagccggtctccccgtaaacgacgccttcgcgccgttcgagtcccaagtgacctgggtcgccctgagaatcgacaccgcaaagctgcgggaaatgaagacgaccccgaaagaattctccaagaaggtcggcgacctgatctttaactccaaggccggatacactatccaccggctggtgctttgtggcgatgacattgatgtctataatggcaaggacgtgatgtgggctttctcgactcgctgccgtcctaacctcgatgagatcttcttcgaggatgtgcccgggttccctcttattccatacatgtcccatggaaacggatcgccagtgaagggtggaaaggttgtttctgatgctcttctcccctgtgagtatactaccgggaaaaattgggaggccgccgattttgagagctcgtatcctgaggcggtcaagcagaaggttttggccaactggacgaagatgggattccgggaggagtaaatcaaatgtatatagtactttgttacctcaaatgtagattggaattttgataaatacagtatataaacttttttggtaattcgggtatatccccggggccatggatacttgccaagcaaccatggccggccccgtaccggtgtaagcccccgtgtaacccgaagtgggcagttctgtcaaggcggaaacccaacccgacctgcgtttcgccctacatggctcagtttagcccatatcaccctataccaagctcggatgcgtgttattgtattgaaagagtcacaacctttcaaacgacacaccttcttggccaatacaacaacccctgataatcccggtacctcggagtcctcggcagcatgagcgccgtcagtcaaagcgaagcagaccgggtgctacacctcaagagccgagagcgagaggctcatgcatgctacacatgcagaaagcggaaagtcaaatgcgatggaaaccaaccatgtcgtacttgtcagaagcgaaaacaccccgaaatctgcacctacgcccttgcacattcgaggcgcagatcggcttctcgccacagtgtcgctcgctcggcttcgcccagatcaccggccgtagcaagcaacgaacaagcacggcctgatgatagttcgaaaaattatgtctattctggtgacaattcggttgtttcgatcctgcgcatgcgagcatcggacgtcaatggatcggtggcccgcgatgttggatctgttcttggtctgcagaataccttcagcaattatatttttatggattcgaagacgccgcttgagaggtggaagtcactgctgactgtaatgcctcagagatcagaggtcttgaagtaagttgcaaacaactaaaaaggaatacggctgactggttagattctttcacttttatcgtgtcacagcatatccattcaatccaatactcgctgacatagaccgctttgaatctgatttatgcacctatctcaatgctcacgcatctggtgaagtacgcgacccggaaaagatcactgatcgctgggcaaccgacaagtctattggccatatcagccttctactagcaacattggcggcaggggcgcattactccgatactgaataccccgaacgctttgaactgtcaactgactttggtaagcttcatcgcacgctcatcaagcttggctaacggtatccagcccgtcgatcatttcatgctctccgcttggccaatttccttttccgaccatcactagatattatacaagcgctgcttatcttggggaatacgctgcagaatatgggacagtccgacgccgcctgggcgttactgggaacgacgatccgattagctcagactatgggcctacacactgaaaggagtactgttcactggccggaaaatgtgagaacgaaggccaggaatctttggtatggaaatcagactatatgcatacctactcgacaactaacttcccacaggtcaacaattgtctggcaggatagtttactgtgcctttgctatgaccgaccgcctattgtctccgtgactggctggtctcccgttaactcgtttttcgagagacaagacttgtccttcgcagaagtgatgtactttatctgtcgtattggtctagatactatgcgaccggaaagcctcagcgtcgctgaatatgaactagcaatagaagggttgcgtcagctagattatgctcatcaacgcggtctaccacatcttcgatcacgggaaaattgcacaacactacaacaacatctcgagcatttagctcttagaatgcacacctccttttgtgtatcggttctctgccgaccggccatgaagcagtccaccccacagccttttctccaccacgctgatattcttcgggcgcgtgccaaaggaagcttgatcgatgcttccagggcatttcttgattttcaagctctaagtactgttccattgcggacctggtcaatggtgcatacagtgttgagttcgaccctgcttctctgcatctgggaagagacgcgcaatgaccccgaatgtcgcaatcttcaacagaaagtcatcgacgtcttctcatcgtctaattcaggaactaatgacgatggtgcttcttcatctgaaagtgatagtcagtggttatcggctcgtcacatccgagccttggtgactttacgaagcgccttggatcgagagcaggaaacgggcgctaccgaaacagagaactgggcagaaatgacctcgaatatggtgccgcaatttggtcctgggtaagtttcctgtccgtagtgaagatggatgctcacatctgaacaggcccatggacatgcccaacccattcgatgtatcacctgtcacatatttggactcgatcatgaaccgtaagcacggtttgcctggtttctattaacaaaagctgacatctcacagttccggtgtttgattatacacaggaaaatggatttctgtgagaaccttaaagccgataccctgcgtgcggtcatgagggccagacctagatcaattacgttttcacaaagcataggcacatacagtaattacccatccaggctttcttgcagatcttcccatcgatctttccctaaataagtggcgccactgtgtaatggccctccgcaaaatcatcggctctcggcctcggggcctcggacgactcaattcggagtctctaaaatctcaatgacatattctcctgtttttcgggccatgcgataacttctagtaagaaaccccgcgcaacatgaatattcggcatcttgccgtagattaatataaaacaagccagggttgctaggctcagttcattcatcacacctatcttcacagctccacgcatcactcaacaagaccgaaataacaccttcaacaaacctcaaaccaatgctttctcttctctctggaacccaaaccccatcttccagtcgccattcccccggagacagtccaactgaaacagccatgccagccatcgatcaagcccctcaacaaacccgacgcagacgcatcgtggtcgcaatgaccggcgcaacgggcgcaattctcggaatcaaagcgctcattgccctgcgtcgtctaaacgtggaaacccacctggtcatgagcaaatgggccgaagcgaccatcaaatacgaaaccgactaccacccctcgaacgtcaaagcactagcagatcacgtccacaatatcaatgacatggcagcgccgatctctagcggatccttcaaaaccgatggcatgatcgttgctccatgtagtatgaagacactggctgctattcacagtggtttctgtgatgatttgatctcgcgcactgcggatgtcatgttgaaagagagacggaaacttgtcctcgttgcgagggaaacaccgcttagcgatattcacctgcgtaatatgctggaggtttcccgtgctggtgcgatcatcttcccgccggtgccggcgtactatatccggcctgcgtcggtggacgacttggttgatcagagtgtggggcgcatgctggatctgtttgatttggagacaggggactttgagagatgggaaggatggcagactcagaaatgaaggccagagctgggttggttcgttttgtcttgcatttattggcgttgatatagactggtgtactcgaaaatttacagtgcttttcatcgacgtcagctttctattcccctcattagatcgatatcgagttcagggtaagtcctgaaactggtgaatacagccgatatcctgaattacttcctggtatgtcccatagtagtcacgcggaaagttactaatttccaaaacccggcattactctacccgccctgtatccggtggttccttccagatcaacgaggataataattgggaaggcgaagaataccaaaaaggaaggagctactccgtagacacccccaaagtcggctctttcctcgggaactcggagacttcggaggccttggaaccttagaaccttataattgttcccgcggctccacttgcctaacccttcttcaacctcctttctctctattgatgtctagtatcaggcacactgctcgttccatcatgtctgctattgcctgcaaacatcttcgtccgcgaaagttcgcacctctcggtgtggagacgtcatctatccctctcctgaagggaattgtgtttgatgtggatgggaccttgtggtgagtcattctttattctttctcttcctaatactctatatatgtgctgtagttatttcccttgttgtatgtttgctatttgcgtgcaccctcgagagctggtatctacatcttgagctattatttggaagtggccggcctgggggcaagaaatgaggattgaggcatcaatttgagattcaggcagaaacgatttcctattcaggaaaatatacctgcttgcgcaggttagatgataagccggtctgggacgtagtagttgagtggaggcgttccctttctcttcgggctttatatcgtattccatctttttcgtcttgttgttttctatttggtattggggcgattctcatgataccaagctctgatcgtgttatcaacaacagtatattgaccgaacctcgctaaccttgaccagcttaccacaaaactatatgttccgtcagatgaggtatgctctactgcctgcgagccattcaaacccctctgtaacaaatattccactatagagaagcactaggaatcgacagctccgtcgatatcctccaccacatccgccaactccccaccgaagaacaacccacagccgtatcgaaggtgcaagcagtagagcgccgagccatggccgaccagcagccgcagcccggcctggttctcctaatggactaccttgaatcccgcggcgtacgacgagcgctctgcacacggaacttcgagtacgttgtagttatcaacgcaaccttccacatgcattctagatacgtactgtaatgtgcacacaacgctaacctatattcgcatctttagagcaccagtccagaacctgattgacaatcatctcaacggtcatgtcttcctaccaatcatcacgcgggacacgccaaatctcctgcccaagcctgatcccgccggcattctgcatattgcgagtgaatggggtcttgatgatggtcggaatttgatcatggttggtgatagcattgatgatatgacggctgggcatatggctggcgctgcgacggtgttgcttttgaatgagcataatgtgcatttgaaggaacatccgcatacggatctttgcattaagcagctatctgatttgatcgatgttctggaggcaggatttgtcgggactagagagaacgatgagcatggcgcgtgatgggatctaggtggaggctgccggatggatattgggcagcatgggtatgtagtgcgtacaatataagaaatatacttgctcaagcgagagattttgaataaactgtcatttaatcgtacatacttgctcagctgagactgagcggaatggtagatgctgttgctggctttcgccgagatctgtcgctcaattctgaaggggtaaaacctccttcttaccacccgcggcttcggccgccgccaccaccaccattacgtggtccgcgtgagaatcctcctcgttgtgatccgcggtttcggccgccgcctctcggtggaggaggaccccgtggaagaggcgggttgggggagcgcgcgcgattgttgtttccagagaatgttgagcgaccacgagaaggccctctagatggtggatcaccaccgcgtttagctctgcttgggaccctgatggaaagagtattgccacgaggagcagggatggggcgtcctcggccgccgcgggatatgcgggacatcatgtcatcatcgtctggggatgggggtcgcgaccattctctgtctcgtccgcgagatcggcttggtgggccggtctctcgctgcgggaggacggtgttgaggtttgtgatcatatctgggtcgattcccttcaaggtaaatgatgatgacgcggctgttgcgcgtaagctgctagatgggcaatctcctacaagatgcttcgcactgcagcaattcgcacagcagattgacactatgacttggtcggagtgaagatccctccttgggaacttccataggaaatcacattcggcttccaggtgttcattgccgcagtagtcacatggcacttcgtaagcgaagttccgtagctttgcatcgcattgcggttcgtcgtgaccacgttcacggcatctttggcatcgtcgccaatcgggacaagtactgctttggtgctgattccaggcaccgcagtgttcacacttcatatttgaggttagtaatgtgaaaataaataactagatgcaagacagaacatacctcttttgctgggcagacatcggctatatggccctcattttgacattcgagacaagagatgggaagtttgaggtctagatcatggatgttacgatcaaaatagacgtacttcgcaaggatctcaaggtctgtctggcttagatccactaaagcaacaggcgcatttggatatttgattgagaaaagtcggaacgcttcctctttcgacccaggtccggattgtgtagatgtgcctgagtttccggtgttggacccatgctgatgggctagagtggcagggtcatagtcattgataccatccatcttgtcccctatgttcagcaggatagagtcatcagcttcagaaccaagagaatctgaatcatccgtgtcactcttggagtcaatttccccatcttccagctcaccgtcgtcttgaggttggttgtttgctgtgggcttgtcttcgccattggccgaaagagattcactgcgactgcgccaatatttatcattcacggcttcaaactgagtgggcttctcatcgggtggtgctggtcgttttccaagtgttgtgtgtactagagcggggttctcgtcggctggtgctgatcgttttccaagtgttgtgcgcactggagccttccgaccttggttccagctaattgcaggcgcggtgctaccggcatgtgggtttgcgacggtagttggggccgcattagaatcggaggctgaactagatccagagctagatgtgttgtctggatcatccactggcagtgaggtggcactgaatgcaacaccttttggaacaaagtcagctaggtccgagtccttatttctattgcggcgccgtctcttggtcgggcgggtgctgtcgcgggatgcggagcgcgaggaacgcggattggaccgagtgcgcggtgcgcccaccagggctgtgcgtgaatcagcctcttcatctgatggatttgccatttggttaatttaattggataatctggataaaaatatcgggagatagagtgagatagagtgagagagagtctggaaggatcaacagtagaatttgggtcccagagaatttcacggcagacgatatagaccactcgcgcaattccacaattggagtttacgacttcgggagatatatgaggcgataagttgtagaacccttggtttgcactccgataaggtttataaccttctttctgtagtatataggaaggaaactattggttgcttttgttttttgagaacagtatctcccaataaatcattacagagagcactagcagacctcgtctcggttgtatacaaccgagacacaaaagaaatcagataatacaagatagataactctaagatcaagtcaacaggtcaattgatcaatgtcaatatgatctagacatgatctagacggcaggcaggccactagccagtaaacccttttgaccggggttgcactcgtgacttcaacatcatatttagattcattcgggtattaatgatacagattatgagccaacacgccacctccaagggcgagtcattaaagctgcagtctgcgtaggatctacccgtaggaggcgatcgacgccaagagtggggttgatgtcatattcgtagtcccaaccgaatgttattatggatcttatggatcttatggatatccatcttaacccctcgttatggtttatggattgggctgatactgttgagtatctatgaactacagctaggtgaatgttcatagcccgcactcatccgcactcccatttgccagattaacgagttgattctaaactgacctggcagtgttggagaactacctagccagcaccagctcttactggataaaccaaagacccatctactcttatttgccggtgacataaaacgctacatataagcacggcaataccaaataatttgggcggaatccgagccagtgttcccgcgatcaactacctcggtttataacaaccgagtatcgggctcgtcatgtaggatgaaggcctctttccatgtcgataagatttgtggagctctacgacagcaccttcagaaacaagaacccggtacatgatttttgtattcaacaatgcagacctctcccatttcatagccattgagaagatgaccacctgccgtggcctagtggactaaatactatgtatcaacaatctttatcaactgttcatgacacctgttcagcattttgcccccggggataacacctcaatacgaagggaaagccggtggcttagcctgaagaagaccgtgccctaaacacggcagaatattgcatgctgccttttcactagaggtctcgaactcattgctattatgcaaacacataaggcccttggctttgaatgtatgattgcacaagaatagcttatgcatctgctaagaatctactatttggccaggtaacattagagattttatataagaacataccgacatattctatatgtatttctaggtctttcaatgtcttctgagatggcaaacgtggcaataagcataattaatttggcatagttgagtaaaggtggccaagtccatatttttagtcttttctatatgcatctatcgaagtctcaagccatattgccccataaaaggaaacgtcaacgataagaaacgtttcagatcttcataaaaccagaccaaaaagacaggatatatataggaaccttcccctttcctgaatccttgatataaagtacaatatagttttactcctttcgggctagattccgcacatgcatacgttttgtacatgggccaattatgcattttgcctctagttgctaggccaatcctgaaagtaggaaatagattagggagaaaaaagacccaatctaattatagacctctgatagaaaagcgagaaggaaaaaaaagatagtcccagcaagaaaaacgagaaaatacgtgaatcagagagctcttccgcaccccgtgaccgaaagccgatccgaccggcaaactcccagtctgggccgtgccacctcatccccacgctccttttcattcttctctccttctcttccaacttattcttttccttttggatccaaccgtcaagctggcgtccgacaattcaaaagtgtcttccctgttgaccccccgggggatatcctttcctccggatgttgacacagggccgcagcggttgtctccaaggatgacctcaaaacaaggccgccggaggcggtccagcagtcttatctaccaggaaccggccgaatctattgagcacactagtgatcaagccgcattgccaaacctgaatgcgaactgggtgaattccaagggtgagtgaccaaaaaaagccgatcctggagaccacatatcacaagatagagaagaaaacaaggactaacgtggaatcttatttcaattacaggtgcttggaccattcatttcgtgtgtatcgccgctctcaagatcttctacgacatcatccccggcgtctcgcaggaaacttcatggaccctcaccaatatcagctacatgttcggatctttcctcatgttccactgggtgcggggcatcccatttgaattcaacgccggtgcctatgacaatctcaacatgtgggagcagatcgacaacggcgatcagtatacgcccgctaagaagttcttgctctgcgtgcctatcgtgctcttcctcctcagcactcattacacccatttcgatttgacccacttcactatcaacttcctggccacattgggggtggtcattcctaagctgcctttcgtatgttatatctgctcgggagaagacttacgaatctcatttgctaacattctgattagtcgcatcggctgcgaataggtctcttctccgatatacccgaggagtcatagtggctcccatttaatctttccttttttttctcaccgataactacccatgttggcgtatccacggcctccttgatttcccgagctttctcgccttcccctccttttctccataaaaggcctttgcattgcgaatttgattgacgggggttgaaccgttcttggccaccgcgcatcctgtttctctttctttcgtgtcggcaaatatgaagagcagaagtcactgcgaatcagtctaaattcccatcctttcggtctgccctaggcagcttatccttgtctagatgttcaagtatccaagccctgcatattttaccctgcaagcatctattctctcgggtccctgctctgcctttgaaatgttgggcctgcgtaatgtaagggatcaacgtacctttgcaatttatgcacataaagtaagacattgtccctagagtaattaatgcatgtcaatctcttggctgtggcccatgcggggaggggctattgtctcattgtgtctagatataatccgatcaggatatcacttctagcaacattcgaatgattatgttcgaaggatacagacaaagagccaaaacaggcaaggatatcgtactgactacgtatataaagcccgtgagagaaattttctttcatctgccttttctaatattctttgtcttaatcctcaacgaaacctcaaaactcgaagagaatgtccatggttttgttcatgtcgagttttagccttgcatctgtttcggcgttcattcgttccttttatttactttttgacgagaatctttgaatttaaagaggcatataatatagtaaggcatgaagagaacatgaaaatacggtcctaatatcatattgacaatagatcagattaccaaagtcttacgcttatttgctttttttgtttaaaggaaccagaggaaggttccttccctattaccacccaagtacctatagcttcctcgattgtagatagcagtcttaacttcctacacggcttggtctaattctcaataaactagctatatcttcaccagctgagtcgtcagtgtttctctccactatggatcaaaaacctttgacagctttccccatatccttcctgaagacaatacatctcatcggttctctctcctggctgcaagtgctctacgcagtctcctacatcgtacgcccgttttggaacacacggcgcgagtttccaccattcaacagagccatcgatcgcacagaaaaaagcattatcaacaccatactcggcactattgcactctcagcccatagttctgaaatagaaacagagcgccagtggtacctttcatcgggaaatggcaccctgaacaacatgcgcaccacctcccaatccatccccagcttgctagtcacctcaccatggccaccggatgaacatcaagactcggattcctcattagagcaagaaagtcccacctcacagccgagcaccgaatctccccgagaaaacttccctatctatgaaaccgtgcgcaagctccgatctagcacacggggcagcatttcaaagctcgccaactcggcaaaatccatcttccgacagcctctgaccgttctgccacggaatatgggcgacccctccccggatgaggaacgggccgagcgagacctgattccagtcccagtacacactgcgcagcctcacttcgtccagaacatggctttccccgcgcccatgtcggcctctgcacatatcacggatcactttagtgaccctggtccgtcgactggaagcaaggtgcaacagccagtctcgtttggggcgaccattgatgcggcagctgattctgatacggtgcagatgaatcgagcgcgcaagtatcaatctgtcgagagctatccgggaaagttccctgttagtgatacattggattatagctcgcttgctagcgcttatgctgttagagggagggggactacctccgttcgacctttctcggactactagggctttttttttggtgatgggcattctcattggcattgcgggtttcggagatgatatctccgtgacgattttggctgtttgactgaaggcttcgaattaggtcttttgatttgctttttaggacatgacatcagagtcagtcctgtacttgggtttctgctattcattatattcattaccaaagatcaggtctgtcaatcttgtcattcaatggaatttctatattttcgcagaattggctagttaccttcttttatagttaggtgagggtcgaaggatctgcttaatctggcgctttgcgattcaaactttcaccaaaacaaacaactcggtactgtaagtacgccgtccacggggactcatgcagtagccctgtcaattcctcgtcaatccaaggaagaaattgtcagttctttcattgtctgtatacttcccaccgcctttgtttccgctcgaaacaaagaagttcaatctttttatagaattagttgtcaacatttctcttagctactagccaatataaaggatagtatgtatttatcctaaatacctctagaacctactttggagtcctttctcttgcataatgtcacatatatcaacatccaactgcctcctgttctgccggacatatacacgtggacctctttcgacgcggacgcgccatccttatcgataagcgcgttactgccactatcttttcagctggcttttcaaaaaaaatcccccctctggccatggcaaccatggacgaggtaccataccggccacatgtgccccttcaatgggagctggctcgacagacagaaatcttcctcgaagatagcctatgtatgttcgcttttcccgtgttttgacgcgtgcgcaaaaaaacctcaaagagtcgctgctaatgatctccttctcaaccagggccgcaagcatatagccttctctttaatgtccttgcatcgggcactatcgcatcaacaaaagcagtgattccactgcctcggcatctggccgtcgcagctacgatgctggtgcacccaagaacaacaacgcgcgccgagacggagtacgaaaaggaagcatccaaagcagctttgcgatttctccgattgacgaattctcttgttggtcccacggatgcaaaatttaatctcgctttcggattcaaccagtttgcatctttgcgacctggtaggcggcgtgcggaaagcccgatgctcgctgagaatgacaatcctgataccaggcctctgaatacgaaattcgaccaggcttcttcggtgtggaactgcgcagaggacttctggcacgctgtcggttgggcatttaattgttcggtgcttcatccggcccggtgggagcgctggcagatatggctccagttcatgtgcaacgtactagaagatgattggaaagagtgcgaaaacaaggcggtacctgatgaccttagcatatttcgggaaagcctgatcttccgttatatctcctcaaactccacagctggacggaaccgcagaatcatgcgggcaatctttaccaatgccaaatcgaatcctggcgagttcaaggaggtattcaaagatgaattaagaatgcccgtccctaaacaagactcgcataatttaaagaagagagcaggtgatatcgacctcgacaagggtcactatggcgattaccagaacaatttcgacgatgatttcgaagctgatcaaagctcaacctcggtattagaatcgactgctaagccacgacgtagcaaacgaacccgacgaggaatgcgcaacgcagaggacgacgccacaaaccccattaagatggccaaagcaagccaatcatcctcccgcgaaagcaacaatctctccctactaggcggctacacttccatcggcctccgccaacaactcctcagcatcctctccaacgtttcggaaaaactgccgcgggacttcatgcccctagacgacctctacaacatgttcgtcgagaacattcgcgacctttcgctcccgatcttccaacacttcatcagcccctccaacccacacctcctacccgaagcgcactccacactctgcgaactcctcctcttcgtcatccgcgaaagctccgccccaagctctgatgccaagtaccttacccaggacaagctggagaaatgcttcctcccctatgcggcggctaccccaaccgtggagaacaatgccaagatctccattctgctcgaggcgctgatgacacacctgcacgagggaaagatgatctctgtgaccccatcgctgacggaagctgtcaactctgggattgcgcgtcgtgagaaggctagtcttgatcgggactcgcttgaatgggcttacttgaaggaaagtgggtttaggatgaagtttatggtcgagcatatcttaccgtgaagcgtttctgtaggatcggggatgaccggcgttgtggtaatgatgttaatggtggtaatgatacttaatgatcggatctcggggcgtttttcaagcgtttgaaatgccatttgattcttttcgggtttataattgttatgatatatacttagagaaatgcagattcttcctacttactgtgaaaggactatcctacgaatgtgtgatcaactgtgaaacgtatttttaaaatgtgtttaatatagagccttgagtataaattgctatctacaagcacatcgcgtcaaaaataaagaacaaaaaaccaagggcctgaagcgggaatcacacgcagataacacaataatccaccaacgcagaaatatgataataagtcttctgttccaatgatgatatccgcccacagaggcaggaggaaatgagcttagaagccgaagtagaaggagagaatagtaagagaatagaaggggcaaggagtcaaagaaacaagaaccctaggttgaataggtaggttcaaggagctgtcaacccaagtcaacgcttattgcggcggccggggcccaatgatctggcgcctagcaccaccaataccaaggccaagaccgccacggttctggttatcaccacccatatagccatactgatgaacatcccaggtctggcccggtccagagccctgggtgccatcttgggcgccacgctcggccacagccgccacttgtttctggttctccgcccactcttcctgacgcgcgcgttcgcgctccatctctcgttctagaagagacttggatgcccagccgccggccttggtcttctgctgtgcagctacgcggcggctattctcggcgtcgacttcggaggtcgtggtatagtcttggaaccggtgggtagctggcgctggggacgcgggtgctggattcgaggcgaggaagctatccacgcggctttcgtggcctcggttggcgttgtatgctactgggtctgggaggggccggggcgacttgggaaggtccctaggagggagcgtcggggttgtagagaaagacgatggctttggcactgggaggggacgagggactgggggtggtgcttgctcctggatgggttcgtgctcctctgcctcggaagcagcaggcatatcctgcgtgttctgccactccgtccggagaaggcgccgttcttgttcgagagaagagagatcatagctaggcttggcgggcacgggacgacgaggctgaggctgaggctgatcgccagtctttccaggctggacttcctgccgctcagtttcgtactggcgctctcggtcctttgccagctgtagctcgcgctcgagctctttgatgcggcggctttgggccgtttcctcgaccggccttgctacggcatcactaacctgggagttggaagcctggtactggctcaggaactgaccattgaggcggttatcattcaggcttcgtctctgttggcgttccttctcaaaccgggcctcggcttccttttcttccgccatacgtcgctgctcttctgcttcccattggcgcttctcttcgtcccagcgcttcttctctgcttccaccttgagacgttcttgctcccttgtacgggcagtctcttcttcccatcggcgctcctcttctgcctgggcacgagcctcctcttctgcaacctgtcgctggtgagcccgatctgcctcttccttctctgcgttctgttgacggatgcgttcgtcctcttcgcgcctgcgcttctctttctctgcaaggcttggtacagcaggtccgggagtggtaatctgtctgcgagcaccaaatgcaatcccttgattcccttggctagctcccccaatgtagccatactggtgaatgttccaagccggcgtggtaccctgctcatctccctttttggcccaagtactgtatgacccggagggtttcgcagggctgcctgtttgagagggaagggtccccccgacaatgctagaggagcgagcggatcggggtgtatatgctccgttgcttgaagaccccgtcgcatttgggctgattacaccgcgcttactctgcgggccaaccgttcggggaaacttgttgggcgcaagggtattggcccgccgactgaacgctgcgatacactggagaacctgcgccggatcctttgcttcgtatagatcaactgtcagaaagacatcgtgcggggggaggttgagcggtggcagttggcatgcgcgcaagaaatgcgaaatattctccatctgtacaaatggcgctgacaacttcttatacttcacgcctggtgacacagcgaggtttactagtcttgtgattaaggagttagccaggggtctagacccactacttgagaaacacagatacaacttacttgcaaagagcaatgccatctttcaggccttcgagtaagtctggcgatgccagtttctcatgcagcatttcctcaatccagtcgcgcacttccgcggctgcctgcggggtatagcgggataagcgcatattgcgcaagtccttgtccaacgaagtcactgaagccatgatgagtgcggaatactcgatgctcgagtttgttgaagtgtaggtagactgttgttgccacttggtatgtatccctttgccggtgcctgaccggccctaatggtggcggcgattgggtagcagaaggaaggcgttccgtgatacaattggtaatgacaagatgaagagaatatttcaattactagaagcgcagatgtttccagtaaagtcgtagaaatgaaaaaaagaaagagaagaaggtctagggatagagagaagatcgaacgggtggaatgttcgggctgtgtttatcccccgatgacgttccttgacatgccgtgcgcctagatcttttttttcgcctccttctattcttcacgctcaacgatggttaacagcttgtggttcaaatggaagaagcttcgcctgccctggcgaaaatccttcttggtcggtcagtatctgctttttgtttttctcgtgatgtctcagtaccgctaaccgtctctcaggtgaggatctcgctggaaataccttctgggagttcaaggatgtgttgaatgcatctcggttccgacgcattgttcgattcgatcccaaaactcatttgagtgatgttcaagtgacacgtaagtcccgtcggaagatgcaggctcgggcttggaccacattccctattccggggtaaagggaagtgagactattgaatcataactaacatgttgtttcaacacagcgcaatggtaccaatggttgcgacatgtccgagaacaccccccgagcatccaggagcagcaacaagatcttgtccgacaggcgcaaatcaaacaactcgctcgactcgccgatgaacgctgggccagcaaaccctccgtcctcgataagcccaagaatcatcaacaaccaccaacgacccagatcaacgaggcgaatttgaatcagcccgctaacgctgctcccgcacaaacagtaccggcttcaaccacatccgaacccgtaccgaagacacaaaaggtggagaacccatggggcaaggccaacaaaaccaacccaggtgaggagtggcaacctgaagcgtggactcctagttccaagcggtgaagatgatatcggcttattccggtcatctctccacaatgctatataagcttgactttcagagatgtgtgccggatggtagagaaggctgtcgccgtgccctgttggtcaatttacagcagaaacacatttcaaggaacccgggtcatagatggcattgaggctatctcatgctgaagagtctttgaactctacccgcgctcctttttgtgtgaggatagcggctattgtgcactatgttcaaccttacaggtcataacaggtgtggcccgacctgtctcgggggtttcaaaagaatgagagccatgtatattggcacttgtatattatgctattatagttttctattatctagcgttttccactcaatcttaccatccactaaaggtattctcgagccctgcaattatactctatatcctagtaaatctagtggctaggcacagtgttttttttatattttcaattttcctactctaacatataaatcaccccctttttggtttttgtatttttccatgctgcagcgcaagtgtcataaaaagacctcaccccccttttttgtatttttcaattgtcgcacttgttgcagcataggcacatctcaagcttgtaagaaaagcaaggatactgcacccttttttttgtcgttttatgtttttttccgtcgctttcatatcatgagcagtattccagctcaataaaagaagtcattgcgaaaatcatagctcagatgattccaaaaaggaatggagcatagcaggagggtgtcaaagtccagattccggaaagattggttagatcgtaacgtcaacaagaagatagaaaggtcaatggtcgatttagatgtagaccatgctgttctggcatgcgcttgccatggccaaggtagtacctctaaacttatcctcgttctggacttgcatgttgttgtcatggtagtaagccaagagatactttcgagcacgatcgcagaacttatcagccaggaaggcaggagtgctgtaactaatcgagcgagtagcgcgacccatcagataacagatattgtgggtaagttcttgcaacacatcagctggcttgcggtcagtattgaccttggggttggtgaagatctcatcgtggatgacaatgtagtgagccggacgagcggaaccctgaagaggagcctgggcttgtagatagaagtcccagtagataggacgggtaactccgcggtcaacaacacatccgttaatggggttagatgtccgatcttgatccttagcattggtagggtagaagcgcacgttatgacgctttccacagacaatgatggtaatgttgggcatggctccacggtataccgctttagcagcagcttgaaccttggggagttcctctgtaaggaccatggggaactgaccgtcgctgacaccgtcgcggtacacgagaatattctggggtaggttgccgttgttggtcttttgccacaagctcaaccgggtaagcatcatctccttgaggaattcaatgtgctcctgacggcgtgtctgggctcgaacctcaccgggccattgtcccatgttgtgatcggtggatgcaacgatggcagcaacactagggaagatttcggggtctgtgcttgacggatgagtgacatccaagccaacgaccatggtgttcttcgctgcactgataaagcgtgcgtttgccggctgcaggagttgattgcatcctcccatcttgaggttgaccttcatcgcgttgttactcaagtactgctcattggcacctctgaacttctcggatagcatgcagtgcgtaaggacgccagtcttaagatctccggcatacttgacgtaatcgaagattttgccttcagtggtaggaagcagaacaactaggaaggggaattctctcatgagcttcttgaatgcgtccttgatcatatcgcgattttgtctgtcatccgggccgagaaggactgagagatacggcttagaaggcggaggaagcgtcaggccatggtcacgcaatttcctgtagaaagcgtccatctcgatctcgggattcttcaaggcatcctcttttccgcgctttcgaagccaaagacagctccatttgctgatgctggcgccacgggcaaatttggtgccgatcaaattccacgagccgtttcgagggttggtagtcttcttgccgccatagagtagattgggaggattcaaaatccgtgcaggtacagtgatcatctccctgccgggcttgatccccactgtcttggtatgtcctccggagattcccattatgtccaatccctcagtcataatagagtcatagttctgaggaggccgccggcaactgaacttgatcatgttctgtcgttggacagcggacggctctggcttgaagcattgcccggggaggacttcgcaaacctctgcaggaaggtaaaccggacgttcacgggttccaacattcaccaccggcatatccttgctgtatttgagtgtcctgttgtaggctgttatttcctgttagcacaacgcaaaataccgagtgataggcagcaaacatactcttgaagaagtattcggtaatgctcatgtattttcccttcttgtcatctcccatccagaacttcacattgtccgcactagatgagaggttttcaatctgaggagggttggggccagggcgtccatcccgaggagtagcagttccgaggatcgttctgacagggtattccattaccccagctccgttctctcgacgctccagatgcaaggcatagactttcacacccttcaggtaccgattcaaaagctctcggtccgttccgtggacttgggcaaaagcaacaagtagctcagacagcatacccgaacggaagaatgcactatggctgacattcaaattaaggaagattcgtccagcaccaacacggacactcgagtagtaaccacgaacggcttcggcgccagccttcatgtccattgactgcttgcgcctgtccatccggaagaacttgttgcgtcccttgccgacgatggaaatgccggtatctttgtaaggatgagcactcatgaggatattcagtactcggagacagggcgcttcattctcaagttcctctcggtggttgacgttctcaaggcacgccatcatctcagccggggaataagagctgtcgagggtcaaagtggcttcccaggggccggtgtaggctttcgatttcccacctccatgtccgcctccgttgcccatggaacaagtgaatggctctctgccttcggggagtagctcggtagtaacaatctcagtagcgccatcggtggcaacgccaattcctttgttgaatagagggtacttgcggaacatactatcgagaacgaacttttgctgtgctttcttcgcctcgggcttgaccttgagccggtaagagtagaatctaacgttcggcttgaactccatggggaagaagttggcgcgaagcacaatcgcacgaccttgagtgccgtagccaggacgtcgagccaaagagttggactctgggcgaacctttgctgactccgtaacgtacttgtcctccaaggcctggaccctggtgctgggagcttcaattgggtccgacaacattctgtgcgcatgttagatataaatctttcctaatgtagaacaaataaacttacccagagggggcttcggacccgccacgtccaccaccgccgcgaccaccaccacggtcactgccacggccccgatcaccgctgtaaccgcggtcaccaccaccccggcctcgggagccaccacgatcaccaccgccacggccgcctcgaatgggcaaatcgtagccacgaccagacattttgacgagtgtctagttagagaaaagaggtagttgtaaaaaagaaatgattatgtgagaccgtgaactttgcacgtgtctgagaaagtaggataagcgacgaaaaggactcgaaacccctagttatttgggtatttcggagaggaaacgaggacagaaggaaggacggaagagtaggtttcaggaaaggacaagcgtaatcttgtccaccgcaggtttcctttttcagaaaaaaaaaagaaaaaaaggtcaaatgcaggttcgttgctctatcgttatgcattagtaacgatgaaaaattggtttgttgatatgcataaagatattgatgtaaactcagaaccatgcagcagagtaatgggtgatgtagggcatgcaatagcatgaggcaagtcgcccaacccacaaccaagagcgagccaatgggaatggaaatgcagtgacaatggagatagtgaggcaatgaagatgtaggactagatatcggatatgaagaactggatgatggtgcaagggaaaaagttcaagggaagacaaatggaaatcaaggtagaccaggaagaaacaaatgaacagcagcaaataagaatatcagaacaaatgctaggaggtatgcctgatctcaatgaagaggcaattggaagagagatttgttgcaaattagggcttggggcaaaggattcacagcaatcaaggggcgacaagcattaccatcaaagcagcaagtgagagatgcaagttaggggaagtgaattgcaagtgaagaattgataaagattaaagtaaggtaaatgcatatgcagtgaggaatacagagaggactggctcagtttgccaatatcagaggtactggcatgcgattgaagggtgtagagacatattagggcaaagaaacgaacaatgtactcaccaaagctgtttgtatgggtcgtggggaggaagaagaaggaagaggaagaaattgctggggatggtatatatagtcggccaccgcagtatgcgcgcgctggtagacttcaagaccatgaggcatgtaacgcgtgttggtggacttcaacttcaatatcatagagtatgcatgaaacgcgcgttagtagacctcaagctggttgatatgtaggacttagggcaaggacttgctacatggaacttataatatgagcctgatagtatggggtaggacttatagtatcagtatagaaggcttggaataaaaagcaagttagccatgaaaatccacagtacttagtactgatagtactagggcaacaaagaagaaatgaagctcaccagtccgacaaagaaagacacatactttaaagctcctggagctcaaaagaaaaaagataaaggaatacagcaaaagctaggtagtcacaaagtattatgaaattaggtatccacagaagagtctaactagatattatgataatctaacattttagggctgtaaacacccggcctaggcctgaaagcaaaaccacaaactccaaaagcaaaccagatattcccaatgatatagccctaaaacaccggctaaaaagaacagagacaaaaaaaaagcagaaggaaaacaaaatcaaaatcaaaaaggcttaacagaaaacagcttcgagggcttcgacgtcgccgccagcgctgcgaacagctctcaatgcggcttcgctcagcttgcgacgtctatcgcgggcttcttgctcgcggcgagccttggtcttggaactgccagagggagcaactccggtcaggatcttcttgctgtcgtcggcagtaaagttgacgaacgatacgctgacagacttgtttgagcctcgggatgaggagctaggggccttggcgggcttgggggtattcatgctctggctggagagcttgcggctgtgtgtgcggcggtgggtgggcttggaaatggatccatggtgggtgtccctgggtgatgtgccggtcttgggagagagagatgatgatgaacgggagatttcgtggacttgggaggaggtgtaggaggtgtcgaatttttgagaggcggtagggagcatattagatgagaatgagtggtcggccgacatgtcatatgagggattgaattgaatcattagtcctccttgcatgatgtcattttggcttccaacgttttgcatgtggcggacaggtgtgggagatgcgaggtaagcggcctgctgttgagcgacccgagaaggcatgggggaccaccattgagattcctggccttggaggtctggggtgaaaggtagggatgaggcatggagagaatcggattgccaagaggagagagaatggaggtcggatgagtgagatgaagagaagatatcatcagcggaagaagggctggagttggtcaaagcggaagagcttgggtgagcaatgtagtgctgttgctgccgcgctgacattgcgatactcggcgactgcattggaactgacggagactggtgatatagccttgcgtcgtactgaggaggcatctctgccgagtctctagactggttcatgatttgttcggtaggcatgttctcatgctgaatgagggcatccgatggaggaggcgacagtggcaaacggtcttcggaattgtgaaggctgaagttctgaagtcgctgggcccaagcctcaggataggccatccttgatttggataggttggaagagcgcattaagctaggggagaaactttgcttgcgcagatgagagcgacgctcattcgggctgcggtggcggatagtcttgggagtgatgagagcactctgggtaggcttccgtctaggggtagctggaggggtagaaggcgagatagacagagcgtgtgttgctgtaggacgagagggaacttcaaagtggttcaggttgacatctgagatggcagaaggatggacggtgtcatggaaagcaaaatgatcggcagcaggtccgtcatactgcagggaccactcattactccagggttgcggtgattgatggcatttgggagtggagacagtgggtgcaagatcgccacagtcgtttgacagcgagtcaagcggaaagagctggtcaaactcggacaacgccgagtcttttccatcagcggcactagtttccatgttgacgtattggttgaacaagtcattgaacgaatggtcgtattgttgggcgaacatcttgccggatttccgtttgcggcgacaaagtaaaagtacggggcaaaagtgtagtcagcgactcaatacccgaaaggctttgatgtgattggataacaaagatatagtctcggaataagcttgggagagtttggggatagttcgggggaatcgacccggatatccgaggagtgcaaaggatgcaaaaagagggagaagcgtttgaatgtttggatgtttgatagtttgtcaatcaaagaaaacactgcagacgatgcaaagaaagcaaagcaaacaaacagatgcaagccctatttgaatagctgccagggacaccagcctcggaatttatggacacattcctcgtccatctttagagcacttggaatgtgctatagagggcccggttggctcctggtcggccccaccaacctccctcaagaatgcttcaaggctctcaaaccaatcgtagttgctggaaatacaatggctggccgagcagttaatctccgtcagatctaaaagacgcttcgtgtcggatagccacccacgggaatgcaaccctccttcactaagccagaagcagtggaacagccatcaaatgggttagtgaagcaggcctttaggggacttaggcatgttggccgataccttaattaaagatcgacatgactcgtacagagtacagagtaagagaacggccgtggaaatgggtcggaacgctctccgaaccgttcaggattgtccaaggaaccaggaccatacagcttggacagaatgatgatcacctatccaaggttggtacttgcagtgtaagcgtcatgatacctgatatcccatcatcaaccgcccgaaaagactcgagttgggtgacagtatgatcggccgtgcactgtggctgcatatttcttgcatttgcttcattatgattagccaattgatcaaatgggggtcggtaatgttgtcgattggtcaatgtcctgttagtgatagacggtccggaatgtgggttggaacgtagaggctgggcggaatgtcacctcccaccccgaacaatgcacagaagagttcttagtattcgagaagaatatgttttcctggaaagctccagtatgaatgttcccctgcttagaagttcggcgaaccttgacctgcaggagatcgccgtcccgggcccttattcgggagtgtttgcttcaaccccatgttctatatttggactgcatgaagatgatcaagataaggccatgtttgaatgcagtagaaaacaagcctttcctccgcatgagataaggatctgatacctcctttccccttcggtataatcgcgccatttagtggtcaaagtgtagtgtccttcaatcggtggggttttaggtggtttttggtacaaatctcagatgatattgattagccaattgtctttgggcgatttttaaatccgctaatagtctgtaatgcgttggtggcgtgtcaatgtgtatgtttcttcctttggcatcgatgtcgtgtttgagttgattcaggcatcacaaacaaagcagccaatattcaaacgaataaagatctaggcgagactgcaggattgacagacatatattgaaagagttaatatattgaaagagttaaaggacaagattcggtatagttgcagttcaaacccaaatcggccaatcagcagttgtgcctgtttcgtcaaacgcagtctaaggcgctaatgcagaatgcagactgccggcctgaataaaattaaaaatagagacagaaaaaaggggtaggtgtcaacaaaccaacgcgtcggcgagaagaagtggtctgcgaatatacgcgatgtgcgatctgggattgagatcgattgccctaacgatgcggcaatagcgggtggccccgttcaacaccatttgtatgcaatcagcaaggacagacttgataataagtcacagatacccctattaaacatgcagttattcaatatcatatgcctaggagtaaatagtaggaaatattgtgaaaatcctgagtgcgacactaaaaaaagcaaacccggctgagaggtactgtgtactccgcattccggtactcccgaggctattcaaaggccgatatagtgtactcagtactgtcacgagtagcatttggaggtataaccgagacaaacgatcaaatgcattcgaatgacctagaaataagttgcatatgactgcatattgtatcgaaagagcccaaacaaaatccccaaggtccagtggacggaccaagttcgggctgagtcagatgacgagaaattggggcgactgccctttcgattccagaaggaactctcctctctctttctcttccttttccccaggccactcgaaacagtgcccttggactattaattctctattactgttactgctactgcttctttgcagtgttccctcgcactttcctctgtactttgtgtcgttgccttgactccagagtcgacgtgactcaacccggatttatttgcccctccgtcacaccccgcgaaacgtgggacactcaactcttctctactttcatctccgctcttacctgccctcttgtcgcgtccttgtgcgataagcctttgtttttgcgacattgcgacccttgctgctctcgcgacattccaacgccgcttgcattgcgtcacgcgaacacaaattctctcctagccactttctaataccctacatgcatctcaacaaaacctgtggcctttttgttattcgtgaccgatatcaacttatttcgaatcattcaagcaaccagtctcgacactgttgcgcgcacccaaccggcaaggaagcacccttctacattcaatcataaagtgtatcaaaaaatcatgtctttcaacatttgtgctgggaacaagttcccctaaacttttacacgattcccgtgtgccttcactatgcacttttcaccgtgctttgcaggctttcgatgcccttgctattctcttgattcactctcgacttactgatatcaccttttcaacctcatttcttccacaaatccggtctctcctatagaggagtgctcggtcaaagcccagaatttcccaattcttgatatcttgggcaattcgccaaatcaccaaagaaagcgtcccactgaaagcatggacaacccaattactgagcaaatgagcaactcggccctccatcgaggctcgtgggaatctgtctcgtctgccttctcccacctcgagatgtctttttcccacgatagctgctatggctcggatgaagtttcggtcacatcgaatagttgcaccccaactcaatcaggtgtatcgactgctactaccaaaccgactttgcgtcctttcttgaaatcgatcctcaaaaactcaaccgttgcctttgactctgatgaagagtccggctcggagtcgggctatagctcagacggaattgattcggagtatgatgcattatctgatgaatccgacgaagaagatgacgatgatgattcggacttctcggtctgggatgaaacaaacggggatgtccctgagacgcatgaggatcacaccgagtcgtttgacgatgccttcatttcctttgaggagaattctgtgcgctttgacccgcaggtagagtacattgacagcgtggaagtatcggatgacgaaggtcctgatcaccaaatgacttgccatgaaatgatgatgcttgctcgggactcgaaaggcacccaaacacttctagatcaactcgataaaatggacatcgccgagtccagaaaagaacattgtcatcaagagtttggtcgcaaatctaccaaccaaccagaagagttttcccgcgatgccgtggacttggactgcagtctctttgtcgcttacatgaatggtatccgcgggattgttacaccgaagtacaagacttaccttcgagttcaggttgaccatattcgcttgggcaaggataccgaattcgtggatacagagggtgcgccttcgttgtatctcgacctagtctccaaccatgtcactggaaccttctgcaacctcctcgctgaggacgagctcaacgagttgatcagactccgcacagtagagcaagccggcaaacaaaacgatacaagctcgtcgaccctaggcttggatcaccaccaagtcctcttaaacaaaattgaaaaattcctgctggacaggttggcgagtggtcgggttgaaattggccctgatgaactgagcttcttcgctggcggcattgcgcacgaactcggtaccaaaacgttgcctgcacaggtctaagatctgcttgcacatcggcaaacaaataacacgactttacgattatgaccaaacatttctttcggattcgccgactatcagggcacacaatgggacggctctttagccaggaaaagcatttaaacttctcataagttgctttcggaataggttttgacagtggtcatgtattttcccgaactagcacttgatatgtattcaaaaaaaaacaatttcaaaacttcagatgttcgcaagttgatgattcaggtgtagctaaacctgtttttctgcctccgtgggactccgaccttgagtgcctagccaatcattctcattcactcctttccgacctaaaccccacctacaacatccgagtctcggacaaggcgagacggaaagaaaatgccagtcttgactcttaaatagtcgaagtataccatactgtaacaactgttcaacctcccttacccattttgagtcctagatactcaacgttttaaggttacactcactgtacatatacctatgtgttcttaaacatatgcacctattgctccgtgcttgcttaatattcacagtagtatgacgaagtatatatatcgtaccaccagctccgagttggatgtttcaaaagtctctaaatacatacccaatacacttatatttctaaccaaaatcaatatcagtatcacattacctaaagcccttttacacaacatggctaaacctataaatttcatacctatgcaggggttaaggaaaaaagatgctgtatcatttgtaccatttatgtgagaataccataaaggaacagtacctattgatctacagtaatactgtagttaaagattaattataacacgccattattctcctagaaatctcctagaaaatctcctgatacttctctaacacacctgatacgccaaccaagcccctttatcactagctggcaaagggcctagacactagtgggcgttccggcccggggaatttctatttttcttccctgcaggggagggatgggctgatgtatttttggacgaggcgtgtgctgtgcggagtaactgttttgtgaagaacgttgaagtattttgtatgtagatcatgggtatgcggagtacgtaactacggcttaacaagatcggttactactaaaccaccctatacaacatacaacataggagacttcaattttttatttttttttcactctcgttctcgttctctgtttctagtctccattccttcagaggtgggactttacatatgcaacggacttcatgcagacaagttatccacctagccccgtcaaaatcagcggggattatcagttgtttcatttgagggtgcaaacttggcagttagatgatgagtgacaggaaataatggatcagacggtatccagctccaccggttataagttcgatattgtatgtacggagtatgtagtcgggagttagtgctatgacgggtataacgcatatcttcatgcagtgaagatcacccggattggcatacgatagtacggagtataatccgtaaccttggatctatctcccaataacgctgctttcggaagaaatgtgaccgtttcgaagtgacatatcagataaacccaaaggtcaagttatcgactcgccgtttttaattaaatccgtcgatcacaacggcgtcgagcacagacagcacggggagaaacccaaaacccactgaggcgtagcatacggagtagctacggagtagggggctttcatttagacttttagaacgatgcggtgaatatgatctggccgaaatagactttgggctcctattctctctgtcattttttgcgtctgtcgtaccttgctgtcgatcattgacgatctcgagttcccttattcggatgatattctgctgtacggagtataatgtggttgatgatcgagcaaaatgaccatctgagtagcagtgcatacaatgtgctctgtataccgctgtgtcattctcgttatagatctcaagcatgaagagcctcacggagaaatacaccgatgaagaagaaatcgcggagatattcggccaaaaatccatcaatcgaataatcggttttctgctaacggcaggatcctgtggggccctgaaggattgtcaggaagggtttgacagctagggaacagagtggagtgtctttctttccgtatggggtacgtagactctaaaaatggagtttggggagcacggagaagggccagtcgctaggtgaaccaagttggttgatgacgattacgagtcatagtcatatccataactatggggttatcgggagtggaaatacagacacggctgagtaaaggcttattcgaatcagtgagaatgacaatattccaacgccggctaccacgtggtttgttaggcgatacggtgactcctgcgtgagattggatgaagctggtgcgtagacgatgttgtgggatgttgatgctgtacaagataagctgcttctagggctgaggggtggtacagaccagggaatatgcataaggataggatctgatatatcgctggatctatggagcagtgctgcaaggcgcgagaacaagttgtgcgctgtacatttattctttgctttttctgggattccggtagttggaaactcctgatcttctgcaggattaaggtgttatccgacaatgtgcattgttatcgttagttcctgctagtgcgcactacgttggagctgctggcaatagtcgcgaccctattgttcactgtcacataggcccacctgacccgagtcctgtcatctccgatgtatgaggtgggtaacggagtactccgcacattccgcaccttgtacacttgtattatccgttttcagctaactacaatatacaatatattaatagatggggctctcagcctctcattcgcttagacaggttcttcaaagaaattgattggaatggtcattccacgggtgagattcggcaaatgaagtgattggaggagccagagttgacagttgaatggttcagatcaggcactgcgcgtgacatagggggcctacaaggggaccgttgctgattgggggaatcgatataagtcgggataattgtctcagataggaaagcattccaaggcctggcaatataaaatgtatacgtaaagtttctagaaactgggaccgggtccccgtagcatggcatttgtgcaccacaggcttatcctcgtgtacccctgggagctgtggaacggctgaggaacgtgtggaaaaggatgttatgcgctaacaactgcactaccgaatgtgccccgtagtactccgtactagcgggtcatacctgaatgaggtacattgagatatcagatatcagaattgcaaataattccgggtccataccttgagagtgcatgcaatatatgtcctccgcgcatacagacaaacttcctttgaggaataatgacggaggccaaaaatcaataattataccagaaaggaaaggcgccaaagactaactgtgtccccgcccgaatccatgggacggcatgcaatgattggctgtccacgaccaatggggtctgaaacgaggtgcgagcggggcactttagcgtgctgatcgctgggacattgtcctgtgtttttttgcctgcgataggctttttctccgaatcagggggaagacggtcttgaatagctcaataagataggaattggaccgtacagtaactgtctaaacctgtatctatgtgagtaagttacatttcagagaaatagcctaattaaggtatggggtatacaaaacaaactgtaatcaggtaagattgtatgatgaatgtaagattgtaagatttgtatacacttgcaggtgctccataaatcatgccgtagtcgaccccgaatattcccaggtccccactgactcggatggaataattactcctgactctctttctcctggcctctacgggtcattctgtctcatcctctcgcttccttccactttccccatgccaatgcggtatgagcactgatcgcatctttgattcaaacgggtaagttggaaatccaccttccattgtcacgggggcccgtccagacgacgttgcgcatgcagtcgtacaagcccccgattccactcgagtcagatttcacccgcagaatcgtgtcagactgaccgtcctgggagtacaggatgatttgaaatttcgatttctacccagcgccttccggtccaaatcgaggtccgcgaaggaacacagaaaaagaggcaaacaaagctgtcaagtcgagccctcgacctaaatatacccggggtacacaatgcaatccttcaaaacacccgacttcttggagactggggccgtgtcccgttcgcgcagccccagtgtcgtttctagcgattcgcaattttctcgagtcaacctcatgtccccaccgtccgtgacgcccgctccagcattcatctcgccctctgcggcttcggatatcgtctctgccgaccaggagttcaacgccgctgattttgtcgccgaggatgaggaaaccggggccggcgccaccgcgctggtgaccccggccgcgctatcgctcctgaacggattcctcgataatctcttgtttaatatcctcgcttcgtccaagtcgacccagctcgcatgcattcgacccgccatggctgatgtgttgaagccccgcctggccaaggaagttgtagcctcggctgaagaagagttgggcgagtatatgggcggagcggacgatgagcagacggaattccgcggtggccaggagcccggcggcgattttgatctagtacgctcatggaagttaacccgtctacgatgcatggtctacacacggctgggcgatatggaagaggatgacgaagatgagtttattgcgcaggatagcctgggagagaccgatggagcaccccgcagattcagcagtcacgtcgacaatattacacccgcagcttctattttccttacctcgatcatcgaatacattggcgagcgggcactcgtcattgccggcgagacatcgcggtctcgtttgtcggcacaactcaacaatggcggtcctgagtttggatctggacatgagcggaaaagaatcgatcgacttgtggtggaagatctcgatatggagaagttggccctgaatgcaaccctgggtcgtctgtggcgcacgtggaggcagcgccgacgcggaaccaatctttctcgaacactatcccgtgaatcattccgcccacgtggatactcgctggcaaacagccgaaagagcagcattgtgaccatcgaggagccaataacgcccaaggagcctctccctgtggcgatgcccccgcctttggaccccgccactgtgcccttgccaacgagccattacgatgttcaagagatcgaggtccctggctatactggcgatctagatggggaggtacagaccatggaggccgttatcgctcacaaggtgcgaccgcgcagtctgatggtgttttcatcgccctcgcttgtcccaaaatctccaggttcagcaagcatctcgcccgtgagtacgtcagctattgaaattggcaatccaatccgtcatgtccgcacgaggtctctacctggtggggcacctacacccgacttcactgaggaggagccggagtggccgacagaccacccgtcacccactgcatcggagaaaaagcaactcgagactatgtacgaggatgatgaatcagcagaatatgtggatgcagctgaaaccagccctggcattgctatcacgacagaagaggaacaggaagagacaccacttatggaacctgtagaagaagcttccgaaattgcgagaatgtcgatcttgcatgaagaagaggaggagacacatcctgtcggggagacggttgcatcattgcacgctatcgcacaagctgaagacgctatgactgatcaatccaatagtcctcgcgtctccctcgtatccttgggtgatcggcggaatcagaaagacctagaagtgattgagggcactgggttatgcgaaaagcctaaattgacttcgacgatacaccgaccaaaacgacaaccctccaaggacgccagtctactgaatgcgaagtcgatctctgaacaaactagcgactctgaactgcaagccgttgcggagagtcagccttcagcgcaaggggttaagaccacgccggctccacccgcaccccccgtcgaggctatcacatctcgtaccgatcacgatgggacccctccgactcgaccatcagaggaatacaccgaaacagcaaaatctctttcccccgatatcatttgctcgacttctggttcaggtaattcgcagctatcgaaaacccgccccagaccttctccgttggaggtcacaaccaacaatcgaagctcctcttcctctacggttgaacgagccgctgttcaacgcatgtctcggccatcgtcatctatcaccactaaaacccgccggtctgggagcttcggcagtgctcgcgagaaaacgcgtccagtgactgccggctccactacctcgcaggtgtctagcaggtttaagggtatcatgaatcggccacagggtgaatctgggccgccccgcatgcgcagctcgtctgaaactagtcgcgcatctggcgggagcgtggactctgtagaagaacttgccgatttggacaagttgatcaacagcgacgagactatccattacactctcactccccgaagtgtgagggagatgacattccccaaacaacccaatcgttcagttcctcggtcagagacggcaggcgtctccgacctggctaatttcttaaataccactccgccaccaggggaagataagcaccgtcctcaaacctcggtttcctcaagagcaaccgaagagatgtctccaatttcccacaccagatccattgattcgcccaagcacatcccgcttaccacgcgcttgaccaacatgtcatcaacatcgaggtctagcaagattgggccggcgcgggatgcgcgagtcccaccctcggactcgacacgcgactttgcggatttcatgaaatcgactggtcctgctggtggggtaaacgagttcaaaccctctatctccgctgagggcacgcggtctgttcgtcctccatccgccgtctcttctgcctcccgtggaaaccgacctaagcttcaagctcggtctgctgagacgaaaggatctccgacctcggacctcattgacttcattcgcgagggacctcctatgcctgcaggtgctcaccggattcctcggacagttgcgcctttcaacgcccttgattcggatgatcttcagatggagaccaccacatccagttctttcgtcagcactgggaatgaatctacacccaataaatcattgacatctcttggttcgcggtccggcttgctggattcaaatcagaacaaggccccagcgtcgacaagcgccatggacttcgacgagcctcagccgcctgttcggaagcaacgccgtgctccagatccgtacgccattgacgacgatgacgatgacgcgtatctagaagagcttctggaacaggaacagaaccccaagcccaagcgcgaggaggagagcctgatggatttcctactcaacgctcctcctcccccttcctccgaacaacccccacagccatttgccgttcgtgctcctgcatcaaataatctctccggtgcatcgggcatgaaggcccgcttgctccgcacttctcataactccttgcgcacccaaaccgcccccaccaaggtccattctgactacgctaccaaggtcggtcagcagcgcaacaatggcaccctgccttctctctcaaatcgcccgaccaacaccggtgatttggcggatttcctccgaaataccggacctcctccagcccccgcgcgagcttcatcaacaccaatgggcgctaagacgaaggacggtagcttctcccgtttcttctcgcgtcgaaagaaggtcgaggcttagggttgaaatcctgacgacattctcgactgtcttgctttgctgagcgttccaatccatctaatgatctacatatcatgtccatcgctttgatattccttgtttgtgcgacaacactgcgatctttgtcattcctttcctctttatcttattcacatagagtcgtgtcctcgtttccttgctgttcgggtggctttttattatcttctttgcgcttgtgtgcgccattttattctctaccttctgcatgggacggaacaattaattcggacttcgggttttctattttgtccctttgtgggacgtcgctttgattgttttcgtggatttcgagataccatgcctatgtacctacactggggctatttttgtaccctgacattcagaaaccatttcattattctgtgaacattataactccaatacaagtaactactagacttacataaataaacaattagacctagcaataactatttgctgcgtgaaaagaatccctcggtcgaagtatagatcgtagaccgtaacaccggaacaaagttaatcccacactccccttaccaggtgtcatcaacagcagcaagcatccgtgtttacaaccgccaattccacgccgcaacaatgggcacctcaccaattacgctgagggccatcttcagcttcctttttgtcttcgtccagcttgccagcgcgctaaaattcgacctgatcgccacctccggcagcggcaagaacgagcgatgcattcgcaacttcgtctctaaggaccagctggtcgttgtcactgccatcgttggcggtacgaagggtgacggccagagggtcaacattcatgtatgtggacttatgtctggatgtggatgggaatccgtcctgcgtctgccgggactcggagaccaaaccgccgaattgcagattgcagattgtggatcgcgactaattcttccttttctgtgtatagatcaaggacgctatgggcaatgactacggtcgccctaaggatgtcgtcggagagacacgtcagcttttcacttcgcccgcggacacggctttcgacgtctgcttcgagaaccagcttgtcggccacagtaagtggtagtccctttgcacaacaccaacaatgcaccgaggaaaaggcggagttaaagagattgtcatgctaaaacaacattaccccatcagacaccatccagaacccctcccgccccgtcgaactcgacgtcgacattggcgccgacgcccgcgactggaacagcattcagtcgcaggagaagctcaagcccgttgaaacagacctacgccgcatcgaggagatggtcgccgatatcgtgactgagatggagtacctgcgtgcgcgtgagcagcgtctgcgtgataccaatgagagcaccaacgagcgcgtgaagtggttcgctttcggaactatgggcatgcttatcgggcttggtgcttggcaggttgtttacctgagagcttacttcaggtatgtgaaattgtggttgtggtggaaggtggagttggttactgactatttggttcttgtagatctaagcatcttatctagatttactagtccgtggaatggttgcatctttgatggttctttttttggtttttgcagcggttgcattgcaaatccttttgctctaacgtcgagtggcattctgttcaacagtcatgatctcaatgatataaaatgtacaccatgctttctgcagcctggcgctaataatattctctgtttatcgcttgtgttgtcctgggattgtggttagctatactttacagggtgcatcttcgaccttgtagtattacctgagtatttatggattaattatatagttctctatgtcggtaaagcactgcttaaatagtatgtgccttggtagatagccctggagggagcttccccagggcttctggtgcatgtgaggtcagtgtatacatctagattgacatctggtaaagggatcccgaggccgatgaagttaaaatatcagacaggccaagacgtcgaacaaatagtgtctcaattctaaagcccaaaaatagacataaagaactgcaccgtgtcgacaagtgtgtaattcacggcctctcagtggcctgccaggtcaatgtttagcattgcaaacagaacaaacaccgggcattgcaggagcttttcggttgcccgggcttattacgccggatgatgtcaaggccaagcatcactcatccctagaggaaaaaaaaagctcccaactccctctctataggacactttacaacaaaatgtccgccccacgtatactccatcgcctcgcgcgaccagtgccatcatccctaagcacaatcacaagactgaacggccaccgccaattcggcgcgacagctctccgtctcaaagatggcaacgacgaagctgcctctggggtaaaggcgcaccgcgccaaccagaccgacaaggtcccgaaccaattcgtgcccaacacaacctccactatgacaaaggacttccccagtgtcggcgagaagcccccgccaccggagatgctgaactcagccgaccccaactacagaccgtccgatccgtacccgggacggattgagcatttcaccggtggtcgtcaagacgatggagcgcgcaagcccgagcttgaagttggtgagatggagggtattacgtttaagattgagcctctgaagagggttggggaagatcttgtcacgaagagggcacgtctgctatgttcgtacccgtttccatgcatgctttgcacctcagtcccaaaccaaagccgaggacctggtgcatctatgtcaagaatgattgaagctaaccaattccactccagaccaaagccgcaagcgtggaatcctcgagtcggacctgctcctctcgactttcgcagatgtctacctgggcaagatggactacgatcagcttgtcgcgtatgacaacttcctcgatgagaacgactgggacatctactactgggccacgcaggacccgcctgaggatatctcacccgacgctcctaaggaggataccatcaccgagacttggaaggagaccggtgccaagagcggtgaatgggcgcagactattggcgctttcagagctgcttaccggcctattccgtcacgctggcaggactctgaggttctcacgctgctcagagagcatgttcgcgataagagcgctcttggctttgagaaggccaagaataagaagattggcggtggtaatggcttggggagaatgcctgatgttcaggtgttccactcgtaagggcctgtgaagagattgaactggatagtttgtcgatttcaaaactgtactatagttgtcatggccatgtttaattgtccataggaggcgtgtattaagaatgttgtatacctgatgatactgggatcaataggtgtaggattcacaataaggatagaaaataaagcgattgttaaattcgaataagacagacttagatgtaaatcaataattatccatctcaatatacatcgtagtccgtatagatccaggtcatgtgacccttcgcttagtattagggctccacggaaccacacaaggagagcagcgaagcggcttagggcttgggcgggcacgtctgcctcccatctcgattttacctccccccccagagtcaacgacaatctccgcccatccctctctctccttcattgtctcattcccatcatggctgagcagctggttcttcgcggcacccttgagggccacaatggctgggttacttccctcgccacctccctggagaagtaagagtgacctatcccgatcgggggattgaatttttgaagggacaaaattctgacttgaatgtttgataatagccccaacatgctgctgtccgcttcccgcgacaagaccctgatcatctggaacctcacccgtgatgagcaggcctacggttaccccaagcgcagcctcgagggtcactcgcacatcgtctctgactgtgtacgtttttcttctcccgaatgaaccacacccacaagccattggatgcgacacatggatttggatggcgcatttcggaaaaaaaaaagatggaatggttttggctgaccgatggtcttgtctgcgttataggtgatctcctccgatggtgcctacgctctgtccgcttcgtgggataagtctctccgtctctgggagctgtccaccggtaacaccacccgcactttcgtcggccacaccaacgatgttctgtccgtctcgttctccgccgacaaccgtcagatcgtctccggttcccgtgatcgctccatcaagttgtggaacacccttggtgactgcaagttcaccatcaccgagaagggccacaccgagtgggtttcctgcgttcgcttcagccccaacccccagaaccccgtcattgtctccgctggctgggacaagctcgtcaaggtacgctatcgattccgaattttcctacacaatttcctccccaccttgctttgcccgcgtgatgtttgcataaacgtatttgctacttcagagcccttcggggccatgagacaatttttcacccaatttgcctgatgggcacagcaacaatttttttgtttttttaaatcgaacgagagaaggattggaaaattttttccttgacacttgacattctttttttgagggtatcgacgctaacattcgatccgcgtctaggtttgggagctcgcttcttgccgtctccagaccgaccacatcggtcacaccggatacatcaacactgtcactatctcccccgacggatccctctgcgcctccggtggcaaggacggtaccaccatgctctgggatcttaacgagtccaagcacctctactccctctccgctggcgatgagatccacgctctcgtcttctcccccaaccgctactggctgtgcgctgccaccagcagctccatcaccatcttcgacctcgagaagaagagcaaggttgatgagctcaagcccgagttcgttgagaagggcaagaagagccgtgaccccgagtgcatcagcttggcctggtccgctgacggccagaccctgttcgccggttacaccgacaacaagatccgtgcctggggtgttatgtcgcgcgcatagatttgagttgttgtatcggagcttgaggagcctctttttgatctattgacaagggaattgaaaaaaagttcaaaagatacggccagaagcgcattggtttgggatgtatgagccacgagcaatgaagcacttctcgccgggacgaagtcgtccccggcctggaggttttctgacatgtctagcctactcgatccacatttaaaatgtatggaatcttgtgcaagacctgtgatgttctaataccagttaaggcatcaaaatgtttcctatttttctttattaaaaatctcttgtaaatcgtaccgtatggttatgttatatatctgtctcatttatcctcccacttgtgttctgaatcctgatgtagggcaatgctacgatagctgtcggatgtctaaattatatgtagaatggtttggagatttctatttccaacaatagtcataatgtacatttgaacagagggccctcacgtatctacccattatttctttccaagtctcttcaaagcctccttggccatcatacttccttcctcatatttaatcccatcagccaacgccttagcctcagtataccgctgcttagcgacttgtggcttcttctgtagctcagccaactccccaaggttatacgtcgcaaccacacatgtgatgtcacactcctcgtcacgtatcgggggtttaatgtgagccgcaacctcaatagccttctccgcccacttctgggcagcctcaacagtctgctccgctgtaacaggttcctgcggctgggccctggcaggcttttgaacctggccgactagagcggtagcaacatcgttcagcagcaccacctgtttgcaagatatagaagttccttcagcggcgcggatcaaatccaacgagcgcatatacagcggcatggctagctcatatcgctccttggcggtataggtagcggcaagctcggccagcgccgtcgctatctcagtaaggttcagccaggcctcgccgtctgccccctcgccactgctagcgctaccaacaggaaggcccagcatctggcggcggcgcatttccttcagacagatctccacagcagcgacctgcgcggcctcggctttcttctcgtcttgtatatactcgctggaataaagctcgccaagcttcatcgcaatgccgacgactttcttgagcgctttgtctcgctgacgagcctcgtactgcgccagtgcttgcagatcttcctggctttcttgaatcacctcgttgttaacctggacaatgggcgcggtcttctggacctgtcccttcgcttgcttcaccttctcggccgcggcagcagcgttacctgctgtgacttgctccacccagaccagagcctcgttcttcgttcgctccagcacatcaatcgccggcttcacaagtccggccttctccagcatcatagcaacctgaagcttgattccaaggatctcatctgagaacgggtgtatgcccatctcgaatgctgtgtgcagtgcctctctgtacgacttcatcgccttggctgggttgaggtcgatctcggtgtaatagatagccgtgcggagagcgtcggccaccggcggcgggaatttgtggtactgcggtccgacacgtgtcaattctacgtaggagatgtaggcaaagatgaaggctccgccgacaaccgagaagattgctagtggcatgaggacggggttcttgcgccagattcctctagatgcttcgcggtatttgcggctgattttctgcaggatcgtgaggtgccgtgtgccggagatgtaggggcttgcgagtggtttgccattgttgatgcggggttggagggttggtcgggtggtgctgttgatgtatattgagcgggcgaggctcttagattgtggttgtagaagttttgcggcaggcgcgctcgtgcgccgtgatgctgctcggaacattggggatgtgtgagtgggtattcggttgagatttcaagttttgattttgattgagcgggtgattgtctgatacaacctgggggattgacgaggatggagaggagatggaaaaggtatatggtgacgagagcccgccctcgattttctggtggtccaagctccgctccgccagatgacgtcgcccgctggagtatgcactcatctttccgcccattccgcctggaaaatgaactgttctcattcagctttaattgtgagacatcgctcttggatcagtctagtggtctaccctgataatgtgtgggcgatacgctttgggtgtggtaagctacggttcctacatctagactgtcctccagctgacgatcccaagcgcttggcgtatatccaacaacagctgcaggagcatggtatgcaagtggatgaagcaccggatgacgattcagtaagagagacatacaactttgcaccgggcaacttcggcgctgtctatcgcgctgagatcaccgataaaaagagccaacaagatgttgatagcgcgcaccaaaaccatgatttagaaaagggaaaagatgacgcgagctcggatgctaagtcagtagacaacacgattatcaaacacaagctccagagcatgaaatggggtctcattccattctggacgaagcgccagccagattacggatccatgatgcgcacgatcaactgtcgcgatgactcgctgatcgatgattcggggatatggactaccatgaaacgacgaaaaagatgcattgtcgtctgccagggcttttacgagtggctgaagaaggggcctgggggaaaggaaaaggttccacactttatccggcgcaaagacggagagctgatgtgctttgctggattatgggactgtgtttcctacgagggcatgccttctttctgatataaaacatcaagccgggctgacgattgcacaggttccgacgaaaagctctacacgtacacggtgatcacaacctcttctaattcctacttgaaattcctgcatgaccgtatgcccgtcattctggactctgggagtgaggcgatgaacaaatggctagacccccgccaaaagacctggtcaaaggagctccagtcaattctcaagccttacgagggtgaactagagtgctatcctgtccccaaagaggttggaaaagttggaaataattccccgaactttattgttcctgtcgacagcaaggaaaacaagagcaatattgcgaacttctttgccaacgcgaaaacgaaggagagtccaaacccctcttcaaaggagccgttgccgaaagtggagatggttaaggacgagcgccctactaagaattcagaatggagcgaggacaatgccccaataccggtgccagctgtcaaaagggagcatagtccagaggctcctgatgccgcgcaggaaagtaagaagcaaaaggtcgattcagatacaactaggccatcgccgcaaaagaagaagttgcgcagtgctacgcataatagccctatgaaaaagtcaagtgggacgaaggcagcagatgggtcgcagcgaattaccaatttcttcaagaaataatacacgcaatgaagcaagtgaaccttgcttctattattcggtcagccatgcttctcgctaatgtatatatatatttttttgtcaaatcaaagacgagaacaacatggtcgatttatatttaccagctgacatgtatctaatagattgagtgagctcagctccatgattgagttgaaaacagttcaatgcaagagaattgtcacgaacttttgagttcagcagcaaccgaatgcaagttgaaaagaaaaaaagagtagaccttcgagaggacttctgagtgaggatatatattacataggattccgtgggcgatgtacccgattttttgagatatcacttcgcaagctctcgtagcttctggaccagcttttctctgaggaaagaactcaatccgaaactatatcaaccaatcaacattggttactcatagataaaacatccaagaaagggggtacttacattccatctcgagtcaggatacgataggtacctgctaagtatcagcttggcctgttgagcctcatatcggaaaacataccactcggctggtaattgccattgtctccaacgaactgcccattggcatccacctcaaggctaccgaacatatcctctggcctgaatggaattagtatgaaataaaatgtacttgttgaaacacaagcaagcttaccaagcaatccgcccatagtcaggcggccgtctgttatcagaaatatgaatccaaccaccacgtccaccagagcctgcaccaccttgaccactagcaccactggtcgagtcggctccacgacgtctcccgcgctgaccggttagtaacacgccgcctgagttcaggttcgctccggccacagacaccatgacctgcgcctgcgacttggcatcggggtcttcatgcgcatattctgagcacacttcttgtacaatattcaggaatttggggttttccttgaaggtgtctgttgtcggtggcagttgagtcgcgagtccgatagctaggtctgggttgactggctcggagggtaataatgacaagatgtgggttccacttgctggtccagttgggaacacatactatgaataatttagcttcaaggagcgctttggaaggtgtaacaagcacatactatgtacggagacccttccaatgtcgatacacaacggaatcgagtccatttgggaagaacccgggcctgtcgtccaaacgctctggctgcaaacattgagatccaaatatagtaaggcagtgggtaactgagtaatggccttgcaggtagcaggtcggatataatcaaattcaagagagctggatcatagcttaatggaaatggcaggcggtttcgaaggcggtgaatataagccggaattaaagtggacctgaccagaaatacctaaagtagtctagcggggattgttgatatcagaaagttaaaaaaacattatagcctcataccaaagcgatggcagttgtgaaacaagtcggccggaaataagagaagccgttcctgctctcatgatcacgttaccattcaattaagcgagcccatgtcgttgtttgtctcatttgtgaatagtggc
